(19) United States
(12) Patent Application Publication
(10) Pub. No.: US 2024/0245765 A1
(43) Pub. Date: Jul. 25, 2024

(54) Use of Ectromelia Virus for Cancer Immunotherapy and Vaccines

(71) Applicants: Thomas Jefferson University, Philadelphia, PA (US); POXIMMUNOMICS LLC, Gaithersburg, MD (US)

(72) Inventors: Renhuan Xu, Gaithersburg, MD (US); Luis Javier Sigal, Glenside, PA (US); Cory Knudson, Philadelphia, PA (US); Linjuan Tang, Philadelphia, PA (US)

(21) Appl. No.: 18/560,538

(22) PCT Filed: May 13, 2022
(86) PCT No.: PCT/US22/29158

§ 371 Date: Nov. 13, 2023

Related U.S. Application Data
(60) Provisional application No. 63/188,021, filed on May 13, 2021.

(51) Int. Cl. A61K 39/215; A61K 39/00; A61P 31/14; A61P 35/00; C12N 7/00; C12N 15/86

(52) U.S. Cl. CPC A61K 39/215; A61K 39/0011; A61P 31/14; A61P 35/00; C12N 7/00; C12N 15/86; A61K 2039/5254; C12N 2710/24022; C12N 2710/24034; C12N 2710/24043; C12N 2770/20034

(57) ABSTRACT

The invention provides an ectromelia virus vector for expression of heterologous sequences under the control of a viral early/late promoter, and methods of use thereof for immunotherapy, cancer treatment and treatment of infectious disease.

### CROSS REFERENCE TO RELATED APPLICATIONS

[0001] This application claims priority to U.S. Provisional Application No. 63/188,021, filed May 13, 2021 which is hereby incorporated by reference herein in its entirety.

### BACKGROUND OF THE INVENTION

[0002] Orthopoxviruses (OPVs) are ˜200 Kb dsDNA viruses that are easy to modify genetically by homologous recombination. Due to their large size and complex genome, OPVs accept large DNA inserts without affecting their infectivity and replication. The most studied OPV is vaccinia virus (VACV), which is the smallpox vaccine. The VACV vaccine has been used for centuries, and its production can be scaled-up to hundreds of millions of doses. VACV can productively infect many species, including mice and humans. Indeed, in immunocompromised people, VACV can produce severe disease and death. Therefore, wild type (WT) VACV is not an ideal option as a vaccine vector.

[0003] The mouse-specific OPV ectromelia virus (ECTV) has a very narrow host specificity for the mouse. Therefore, it is apathogenic in all non-mouse species tested, such as rats, rabbits, guinea pigs, and hamsters (Burnet et al., 1946, Journal of immunology, 53:1-13; Flynn et al., 1963, Anl-6723. ANL Rep. 50-2; Flynn et al., 1962, Proc Anim Care Panel, 12:263-6). ECTV is also apathogenic in humans. Because of this, ECTV is classified as a biosafety level 1 (BSL1) pathogen. Despite being used in research for almost a century, there has never been a human infection report with ECTV. Over the course of approximately 17 years, many tools have been developed to make recombinant ECTV expressing a variety of proteins. Initially, the gene for green fluorescent protein (GFP) was introduced as a replacement for other genes that were to be targeted for deletion, such as the Type I interferon (IFN-I) decoy receptor EVM166 encoded by ECTV. The resulting virus, ECTV-Δ166, is attenuated in mice >7 orders of magnitude (4). GFP was also introduced in a noncoding region of the genome (Xu et al., 2008, The Journal of experimental medicine, 205(4):981-92). In subsequent studies, ECTV-Δ036 was generated, a mutant virus lacking a protein called EVM036, which is required for ECTV to spread from cell to cell in tissue culture. ECTV-4036 does not replicate well in tissue culture, forming tiny plaques and is extremely attenuated in vivo. Furthermore, a plasmid was produced whereby one could reintroduce EVM036 together with any protein of interest into ECTV-4036 to produce a new virus that generates the protein of interest and replicates normally (Roscoe et al., 2012, Journal of virology, 86(24): 13501-7). Therefore, a method of easily producing ECTV expressing any protein of interest has been created. Severe acute respiratory syndrome-coronavirus 2 (SARS-CoV-2) is the causative agent of Coronavirus (CoV) disease 2019 (COVID-19) (Zhu et al., 2020, N Engl J Med, 382(8): 727-33; Zhou et al., 2020, Nature, 579(7798):270-3). Following SARS-CoV-2 infection, people can remain asymptomatic or develop overt signs of disease, ranging from relatively minor discomfort of the upper respiratory tract to pneumonia that frequently develops into fatal acute respiratory distress syndrome (ARDS) (Zhou et al., 2020, Nature, 579(7798):270-3; Huang et al., 2020, Lancet, 395(10223):497-506). ARDS was also the main reason for death after infection with the highly related coronavirus SARS-CoV-1, which caused an epidemic in 2002-2003 (Hui et al., 2010, Infect Dis Clin North Am, 24(3):619-38; Rainer et al., 2004, Curr Opin Pulm Med, 10(3):159-65). The pathogenesis and immunobiology of SARS-CoV-1 and SARS-CoV-2 appear similar. Likely, this is the result of their genetic relatedness (˜79%) (Zhou et al., 2020, Nature, 579(7798):270-3; Wang et al., 2020, Eur J Clin Microbiol Infect Dis, 39(9): 1629-1635; Lu et al., 2020, Lancet, 395(10224):565-74), their use of human angiotensin-converting enzyme 2 (hACE2) as the receptor to enter cells (Wrapp et al., 2020, Science, 367(6483): 1260-3; Walls et al., 2020, Cell, 181(2):281-292.e6). The initial phase of SARS-CoV-1 and SARSCoV-2 pneumonia includes diffuse alveolar damage (DAD), characterized by protein-rich edema, inflammation, surfactant dysfunction, and severe hypoxia (Hui et al., 2010, Infect Dis Clin North Am, 24(3):619-38; Rainer et al., 2004, Curr Opin Pulm Med, 10(3):159-65). From there, DAD can progress into ARDS with pulmonary fibrosis, hyaline membrane formation, and eventually microangiopathy, angiogenesis, and thrombosis, followed by widespread organ failure (Rainer et al., 2004, Curr Opin Pulm Med, 10(3):159-65; Ackermann et al., 2020, N Engl J Med, 383(2): 120-128). Fatal disease and death from SARS-CoV-1 and -2 are more common in the aged, in males, and in people with co-morbidities such as heart disease and diabetes (Chen et al., 2020, Lancet, 395(10223):507-13; Wu et al., 2020, Nat Med. 2020; 26(4):506-10). However, not all aged individuals or those with co-morbidities develop severe disease (Chen et al., 2020, Lancet, 395(10223):507-13; Wu et al., 2020, Nat Med. 2020; 26(4):506-10). Furthermore, complications and death can also occur in apparently healthy young people (Liu et al., 2020, J Infect, 80(6):e14-e18). Critically, there are not yet ways to predict, prevent, or specifically treat COVID19 (Velavan et al., 2020, Int J Infect Dis, 95:304-7; Confalonieri et al., 2017, Eur Respir Rev, 26(144):160116), and a vaccine is sorely needed. Covid vaccines that are currently approved use adenovirus vectors (AV) (Kaur et al., 2020, Virus Res, 288:198114). If the immunity AV induce is short-lived, it is likely AV will not be useful for re-immunization due to immunity to the vector itself. Moreover, anti-AV immunity would prevent AV re-use for vaccines against other emerging viruses. Therefore, it is crucial to introduce novel vectors to the immune-modulating arsenal for COVID-19, cancer and other diseases.

[0004] Thus, there is a need in the art for improved compositions and methods for cancer immunotherapy and vaccination against viral infection. This invention satisfies this unmet need.

### SUMMARY OF THE INVENTION

[0005] In one embodiment, the invention relates to a recombinant ectromelia virus (ECTV) vector comprising at least one expression unit for expression of at least one heterologous nucleic acid sequence. In one embodiment, the at least one expression unit is under the control of an ECTV early/late promoter. In one embodiment, the ECTV vector is attenuated. In one embodiment, the early/late promoter is selected from the group consisting of 7.5 and H5.

[0006] In one embodiment, the ECTV vector comprises a deletion or inactivation of at least one immune evasion gene. In one embodiment, the at least one immune evasion gene is selected from the group consisting of a cytokine receptor homologue and a cytokine mimic.

[0007] In one embodiment, the ECTV vector further comprises one or more additional heterologous nucleotide sequence. In one embodiment, the one or more additional heterologous nucleotide sequence is a sequence encoding a therapeutic agent, a sequence encoding a targeting moiety, a sequence encoding a detectable and/or selectable marker, a pro-apoptotic gene, or a pro-necroptotic gene.

[0008] In one embodiment, the target nucleotide sequence encodes an antigenic polypeptide sequence, an antibody or an antibody fragment. In one embodiment, the antigenic polypeptide sequence is a cancer/tumor antigen, an autoantigen, an allergen, an antigen associated with hypersensitivity, a prion antigen, a viral antigen, a bacterial antigen, an antigen from protozoa or fungi, or a parasitic antigen.

[0009] In one embodiment, the at least one antigen comprises a cancer specific antigen.

[0010] In one embodiment, the at least one antigen comprises a viral antigen. In one embodiment, the viral antigen is selected from the group consisting of SARS-CoV-2 spike antigen, and a fragment of the SARS-CoV-2 spike antigen comprising the receptor binding domain (RBD).

[0011] In one embodiment, the at least one antigen is a bacterial antigen.

[0012] In one embodiment, the expression unit comprises at least two nucleotide sequences encoding antigenic polypeptides. In one embodiment, the at least two antigenic polypeptides are from two different viruses or from two different clades of the same virus.

[0013] In one embodiment, the expression unit comprises at least one antigenic polypeptide from a virus and at least one cancer-specific antigenic polypeptide.

[0014] In one embodiment, at least one antigen is a CTL-recognized epitope, a T helper cell-recognized epitope, or a B cell-recognized epitope.

[0015] In one embodiment, the invention relates to a vaccine comprising a recombinant ectromelia virus (ECTV) vector comprising at least one expression unit for expression of at least one heterologous nucleic acid sequence. In one embodiment, the at least one expression unit is under the control of an ECTV early/late promoter. In one embodiment, the ECTV vector is attenuated. In one embodiment, the early/late promoter is selected from the group consisting of 7.5 and H5.

[0016] In one embodiment, the composition further comprises a pharmaceutical carrier.

[0017] In one embodiment, the invention relates to a method for inducing an immune response in a subject comprising administering a vaccine comprising a recombinant ectromelia virus (ECTV) vector comprising at least one expression unit for expression of at least one heterologous nucleic acid sequence to the subject in an amount effective to induce an immune response. In one embodiment, the immune response comprises one or more of: the production of memory CD8+ T cells specific for the at least one antigen, the production of memory CD4+ T cells specific for the at least one antigen, and the production of antibodies specific for the at least one antigen.

[0018] In one embodiment, the invention relates to a method for treating cancer in a subject in need thereof, the method comprising administering a vaccine comprising a recombinant ectromelia virus (ECTV) vector comprising at least one expression unit for expression of at least one heterologous nucleic acid sequence to the subject.

[0019] In one embodiment, the recombinant ECTV vector comprises a target nucleotide sequence encoding a cancer antigen.

[0020] In one embodiment, the recombinant ECTV vector further comprises a target nucleotide sequence encoding a viral antigen. In one embodiment, the viral antigen is selected from the group consisting of an influenza viral antigen and a human cytomegalovirus antigen.

[0021] In one embodiment, the recombinant ECTV vector comprises a target nucleotide sequence encoding an immunotherapeutic antibody for the treatment of cancer.

[0022] In one embodiment, the invention relates to a method for treating a viral infection, or a disease or disorder associated therewith, in a subject in need thereof, the method comprising administering a vaccine comprising a recombinant ectromelia virus (ECTV) vector comprising at least one expression unit for expression of at least one heterologous nucleic acid sequence to the subject. In one embodiment, the recombinant ECTV vector comprises a target nucleotide sequence encoding a viral antigen. In one embodiment, the viral infection comprises SARS-CoV-2 infection. In one embodiment, the recombinant ECTV vector comprises a target nucleotide sequence encodes an immunotherapeutic antibody for the treatment of the viral infection.

### BRIEF DESCRIPTION OF THE DRAWINGS

[0023] The following detailed description of embodiments of the invention will be better understood when read in conjunction with the appended drawings. It should be understood that the invention is not limited to the precise arrangements and instrumentalities of the embodiments shown in the drawings.

[0024] FIG. 1, comprising FIGS. 1A-B, depicts exemplary results demonstrating that ECTV-Luciferase (Luc) replicates locally at the site of infection in rats and induces anti-orthopoxvirus (OPV) and anti-Luc antibody responses. FIG. 1A depicts result demonstrating Luc expression in rats infected with ECTV-Luc and imaged 1 and 3 days post infection (dpi) using an IVS machine to measure light emission. FIG. 1B depicts results of antibodies for OPV (vaccinia virus; filled triangles) or Luc (open circles) in rats one month after ECTV-Luc infection or in uninfected naïve rats (closed squares). Rats were bled and antibodies were measured from the sera by enzyme-linked immunosorbent assay (ELISA).

[0025] FIG. 2 depicts exemplary results demonstrating OPV infection of human and rat tumor cells in vitro. Androgen-sensitive human prostate adenocarcinoma cells (LNCaP; left) and rat bladder urothelial carcinoma cells (AY-27; right) were infected with 10 plaque-forming units (pfu) of VACV (black bars) or ECTV (white bars) and viability was determined by trypan blue exclusion at 0, 1, 3 and 5 days post-infection.

[0026] FIG. 3 depicts exemplary results demonstrating that ECTV infects rat tumors in vivo and that it remains restricted to the tumor. A female Fischer 344 rat was injected with 5×10⁶ AY-27 tumor cells and, after 1 month, the tumor was injected with 1×10⁷ pfu of ECTV-Luc. Three days after infection, mice were imaged using an IVS machine to measure light emission after inoculating with luciferin.

[0027] FIG. 4 depicts exemplary results demonstrating the anti-tumor effect of intra-tumoral VACV infection in mice previously vaccinated against VACV. BALB/c mice (n=5) were either immunized with VACV (immunized-VV it) or not (Control and VV it). One month later, all mice were inoculated with 2×10⁵ mouse mammary adenocarcinoma (TS/A) tumor cells and, at 7 and 10 days after tumor challenge, 5×10⁶ pfu of VACV was injected intratumorally (VV it and immunized-VV it) or not (Control). Tumor volume was then monitored for a total of 18 days after tumor challenge.

[0028] FIG. 5 depicts a schematic of SARS-CoV-2 S protein-mediated infection and how neutralizing antibodies (Abs) may prevent it. In the receptor binding stage, the S1 subunit of SARS-CoV-2 binds ACE2 at the host cell surface. Neutralizing Abs can bind to the RBD domain on S1 to block the interaction of the RBD with ACE2. Crossreactive antibodies with other CoVs can bind conserved epitopes on the RBDs. After S1 is cleaved, the viral fusion peptide (FP) on the S2 subunit inserts into the host cell membrane, inducing the conformational change of the S2 subunit, which forms a six-helix bundle (6-HB) with HR1 and HR2 trimers. Antibodies that target the HR domains could block viral fusion.

[0029] FIG. 6 depicts exemplary results demonstrating detection of S and S1 expression in ECTV-S and ECTV-S1 by Western Blot. Lysates of BSC-1 cells infected with the indicated viruses were analyzed by Western Blot using anti-SARS-CoV-2 S1 Ab (Sino Biologicals). Molecular weight markers (MWM) are on the right with sizes (Kd) indicated.

[0030] FIG. 7 depicts exemplary results demonstrating that ECTV-S and ECTV-S1 induce strong anti-S Ab responses in mice. C57BL/6 mice (n=4) were left uninfected (filled circles) or infected with 3,000 pfu of ECTV-S (open squares), ECTV-S1 (shaded triangles) or ECTV-WT (filled squares) as a control. At 30 days post-infection (dpi), Abs to SARS-CoV-2 receptor-binding domain (RBD; right), S1 (middle) or S2 (left) were determined by ELISA using the indicated plate-immobilized proteins and anti-mouse IgG labeled with horseradish peroxidase as a secondary Ab.

[0031] FIG. 8 depicts a map of pBSSK ECTV7.5 EGFP (SEQ ID NO:4) used to produce ECTV-EGFP.

[0032] FIG. 9 depicts a map of pBSSK-ECTV036Rev (SEQ ID NO:5) used to produce novel ECTV recombinants by homologous recombination (selection of non-green plaques).

### DETAILED DESCRIPTION

[0033] In one embodiment, invention provides ectromelia virus (ECTV) vectors for use as expression vectors in vitro and in vivo. Whole genes, open reading frames (ORFs), and other exogenous nucleotide fragments, such as nucleic acid sequences to generate antibodies, antigens or antisense products, are contemplated for expression using the OPV vectors of the present invention.

[0034] Classes of genes contemplated for expression with the ECTV vectors of the present invention include tumor suppressor genes, cytotoxic genes, cytostatic genes, cytokines, and antigen encoding genes.

[0035] Also provided are methods of use of the ECTV vectors for treatment of diseases and disorders, including cancer and infectious disease. Such treatment includes methods of administering the ECTV vector of the invention comprising a heterologous nucleotide sequence for the treatment of the disease or disorder to a subject in need of treatment.

### Definitions

[0036] Unless defined otherwise, all technical and scientific terms used herein have the same meaning as commonly understood by one of ordinary skill in the art to which this invention belongs.

[0037] As used herein, each of the following terms has the meaning associated with it in this section.

[0038] The articles “a” and “an” are used herein to refer to one or to more than one (i.e., to at least one) of the grammatical object of the article. By way of example, “an element” means one element or more than one element.

[0039] “About” as used herein when referring to a measurable value such as an amount, a temporal duration, and the like, is meant to encompass variations of ±20%, ±10%, ±5%, ±1%, or ±0.1% from the specified value, as such variations are appropriate to perform the disclosed methods.

[0040] As used herein, “under transcriptional control” or “operably linked” refers to expression (e.g., transcription or translation) of a polynucleotide sequence which is controlled by an appropriate juxtaposition of an expression control element and a coding sequence. In one aspect, a DNA sequence is “operatively linked” or “operably linked” to an expression control sequence when the expression control sequence controls and regulates the transcription of that DNA sequence. A construct comprising a nucleic acid sequence operably linked to an expression control sequence is referred to herein as an “expression unit” or “expression cassette”.

[0041] As used herein, “an expression control sequence” refers to promoter sequences to bind RNA polymerase, enhancer sequences, respectively, and/or translation initiation sequences for ribosome binding. For example, a bacterial expression vector can include a promoter such as the lac promoter and for transcription initiation, the Shine-Dalgarno sequence and the start codon AUG. In some embodiments, a eukaryotic expression vector includes a heterologous, homologous, or chimeric promoter for RNA polymerase II, a downstream polyadenylation signal, the start codon AUG, and a termination codon for detachment of a ribosome.

[0042] As used herein, a “nucleic acid delivery vector” is a nucleic acid molecule which can transport a polynucleotide of interest into a cell. In one embodiment, such a vector comprises a coding sequence operably linked to an expression control sequence.

[0043] As used herein, “nucleic acid delivery,” or “nucleic acid transfer,” refers to the introduction of an exogenous polynucleotide (e.g., such as an expression cassette) into a host cell, irrespective of the method used for the introduction. The introduced polynucleotide may be stably or transiently maintained in the host cell. Stable maintenance typically requires that the introduced polynucleotide either contains an origin of replication compatible with the host cell or integrates into a replicon of the host cell such as an extrachromosomal replicon (e.g., a plasmid) or a nuclear or mitochondrial chromosome.

[0044] As used herein, a “a recombinant vaccine vector” refers to a polynucleotide to be delivered into a host cell, either in vivo, ex vivo or in vitro which comprises genomic sequences from a vaccine virus and a heterologous nucleic acid sequence. In some embodiments, one or more virulence-associated sequences are inactivated in the vector. A vector may be encapsulated by viral capsid proteins or may comprise naked nucleic acids or may comprise nucleic acids associated with one or more molecules for facilitating entry into a cell (e.g., such as liposomes). Examples of vaccine viruses include, but are not limited to, poxviruses as further defined below.

[0045] As used herein, “an attenuated virus” or a virus having one or more “inactivated virulence associated genes” refers to a virus that is replication deficient or which replicates less efficiently than a wild type virus in a particular host.

[0046] As used herein, the term “administering a nucleic acid to a cell” or “administering a vector to a cell” refers to infecting (e.g., in the form of a virus), transducing, transfecting, microinjecting, electroporating, or shooting the cell with the nucleic acid/vector. In some aspects, molecules are introduced into a target cell by contacting the target cell with a delivery cell (e.g., by cell fusion or by lysing the delivery cell when it is in proximity to the target cell).

[0047] A cell has been “transformed”, “transduced”, or “transfected” by exogenous or heterologous nucleic acids when such nucleic acids have been introduced inside the cell. Transforming DNA may or may not be integrated (covalently linked) with chromosomal DNA making up the genome of the cell. In prokaryotes, yeast, and mammalian cells for example, the transforming DNA may be maintained on an episomal element, such as a plasmid. In a eukaryotic cell, a stably transformed cell is one in which the transforming DNA has become integrated into a chromosome so that it is inherited by daughter cells through chromosome replication. This stability is demonstrated by the ability of the eukaryotic cell to establish cell lines or clones comprised of a population of daughter cells containing the transforming DNA. A “clone” is a population of cells derived from a single cell or common ancestor by mitosis. A “cell line” is a clone of a primary cell that is capable of stable growth in vitro for many generations (e.g., at least about 10).

[0048] As used herein, the term “isolated” means separated from constituents, cellular and otherwise, in which the polynucleotide, peptide, polypeptide, protein, antibody, or fragments thereof, are normally associated with in nature. For example, with respect to a polynucleotide, an isolated polynucleotide is one that is separated from the 5′ and 3′ sequences with which it is normally associated in the chromosome. As is apparent to those of skill in the art, a non-naturally occurring polynucleotide, peptide, polypeptide, protein, antibody, or fragments thereof, does not require “isolation” to distinguish it from its naturally occurring counterpart.

[0049] As used herein, a “target cell” or “recipient cell” refers to an individual cell or cell which is desired to be, or has been, a recipient of exogenous nucleic acid molecules, polynucleotides and/or proteins. The term is also intended to include progeny of a single cell, and the progeny may not necessarily be completely identical (in morphology or in genomic or total DNA complement) to the original parent cell due to natural, accidental, or deliberate mutation. A target cell may be in contact with other cells (e.g., as in a tissue) or may be found circulating within the body of an organism.

[0050] As used herein, a “subject” is a vertebrate, including a mammal. Mammals include, but are not limited to, murines, non-human primates, humans, farm animals, sport animals, pets, and feral or wild animals.

[0051] The terms “cancer,” “neoplasm,” and “tumor,” are used interchangeably and in either the singular or plural form, refer to cells that have undergone a malignant transformation that makes them pathological to the host organism. Primary cancer cells transformation that makes them pathological to the host organism. Primary cancer cells (that is, cells obtained from near the site of malignant transformation) can be readily distinguished from non-cancerous cells by well-established techniques, particularly histological examination. The definition of a cancer cell, as used herein, includes not only a primary cancer cell, but also any cell derived from a cancer cell ancestor. This includes metastasized cancer cells, and in vitro cultures and cell lines derived from cancer cells. When referring to a type of cancer that normally manifests as a solid tumor, a “clinically detectable” tumor is one that is detectable on the basis of tumor mass; e.g., by procedures such as CAT scan, MR imaging, X-ray, ultrasound or palpation, and/or which is detectable because of the expression of one or more cancer-specific antigens in a sample obtainable from a patient.

[0052] As used herein, the term “pharmaceutically acceptable carrier” encompasses any of the standard pharmaceutical carriers, such as a phosphate buffered saline solution, water, and emulsions, such as an oil/water or water/oil emulsion, and various types of wetting agents. The compositions also can include stabilizers and preservatives.

[0053] The term “antigen source” as used herein covers any substance that will elicit an innate or adaptive immune response. An antigen source may require processing (e.g., such as proteolysis) to produce an antigen. An antigen source may be a polypeptide/protein, peptide, microorganism, tissue, oligo- or polysaccharide, nucleic acid (encoding an antigen or a polypeptide/protein comprising an antigen or itself serving as the antigen).

[0054] As used herein, the terms “antigen”, “antigenic determinant” or “epitope” are used synonymously to refer to a short peptide sequence or oligosaccharide, that is specifically recognized or specifically bound by a component of the immune system. Generally, antigens are recognized in the context of an MHC/HLA molecule to which they are bound on an antigen presenting cell.

[0055] As used herein, a “therapeutic vaccine” is a vaccine designed to boost the immune response to an antigen in a subject already exposed to the antigen.

[0056] As used herein, a “therapeutically effective amount” refers to an amount sufficient to prevent, correct and/or normalize an abnormal physiological response. In one aspect, a “therapeutically effective amount” is an amount sufficient to reduce by at least about 30 percent, by at least 50 percent, or by at least 90 percent, a clinically significant feature of pathology, such as for example, suppression of CD4 cells, decrease in viral load; decrease in size of a tumor mass, and the like. In one embodiment, a “therapeutically effective amount of a vaccine composition” enhances a beneficial immune response to a vaccine antigen by at least about 30%, by at least about 50%, or by at least about 90%, i.e., increasing CTL responses against the antigen, increasing secretion of γ-IFN by CD8+ T, increasing production of antibodies specific for a vaccine antigen or increasing the duration of these responses after administration of a vaccine composition.

[0057] As used herein, an immune response with “increased duration” refers to a significant response observed at least about 4 months, about 6 months, about 8 months, about 10 months, about 12 months, about 16 months, about 18 months, or at least about 20 months after initial administration of an antigen.

[0058] An “antibody” is any immunoglobulin, including antibodies and fragments thereof, that binds a specific antigen. The term encompasses polyclonal, monoclonal, and chimeric antibodies (e.g., bispecific antibodies). An “antibody combining site” is that structural portion of an antibody molecule comprised of heavy and light chain variable and hypervariable regions that specifically binds antigen. Exemplary antibody molecules are intact immunoglobulin molecules, substantially intact immunoglobulin molecules, and those portions of an immunoglobulin molecule that contains the paratope, including Fab, Fab′, F(ab′)2 and F(v) portions.

[0059] As used herein, the term “immune effector cells” refers to cells capable of binding an antigen and which mediate an immune response. These cells include, but are not limited to, T cells, B cells, monocytes, macrophages, dendritic cells, NK cells and cytotoxic T lymphocytes (CTLs), for example CTL lines, CTL clones, and CTLs from tumor, inflammatory, or other infiltrates.

[0060] As used herein, the term “viral infection” describes a disease state in which a virus invades healthy cells, uses the cell's reproductive machinery to multiply or replicate and ultimately lyse the cell resulting in cell death, release of viral particles and the infection of other cells by the newly produced progeny viruses. A “non-productive infection”, i.e., by a vaccine virus vector is an infection in which the vector is introduced into a cell but does not replicate within the cell, either because of inactivation of virulence associated gene(s) or because of a restricted host-range.

[0061] As used herein, the term “treating or preventing viral infections” means to inhibit the replication of the particular virus, to inhibit viral transmission, or to prevent the virus from establishing itself in its host, and to ameliorate or alleviate the symptoms of the disease caused by the viral infection.

[0062] As used herein, an “adjuvant” refers to a substance that enhances, augments or potentiates the host's immune response to a vaccine antigen.

[0063] The term “immunogenicity” means relative effectiveness of an immunogen or antigen to induce an immune response.

[0064] As used herein, a “booster” refers to a second or later vaccine dose given after the primary dose(s) to increase the immune response to the original vaccine antigen(s). The vaccine given as the booster dose may or may not be the same as the primary vaccine.

[0065] As used herein, “immunity” refers to natural or acquired resistance provided by the immune system to a specific disease. Immunity may be partial or complete, specific or nonspecific, long-lasting or temporary.

[0066] Ranges: throughout this disclosure, various aspects of the invention can be presented in a range format. It should be understood that the description in range format is merely for convenience and brevity and should not be construed as an inflexible limitation on the scope of the invention. Accordingly, the description of a range should be considered to have specifically disclosed all the possible subranges as well as individual numerical values within that range. For example, description of a range such as from 1 to 6 should be considered to have specifically disclosed subranges such as from 1 to 3, from 1 to 4, from 1 to 5, from 2 to 4, from 2 to 6, from 3 to 6 etc., as well as individual numbers within that range, for example, 1, 2, 2.7, 3, 4, 5, 5.3, and 6. This applies regardless of the breadth of the range.

### Description

[0067] In one embodiment, the present invention provides an Orthopoxvirus (OPV) vector in which a gene encoding an antigenic polypeptide is expressed from an early/late promoter. The large genome size of these viruses permits the engineering of vectors capable of accepting at least 25,000 base pairs of foreign DNA (Smith, et al., Gene 25: 21, 1983). Additionally, poxviruses can infect most eukaryotic cell types and do not require specific receptors for entry into a cell. Unlike other DNA viruses, poxviruses replicate exclusively in the cytoplasm of infected cells, reducing the possibility of genetic exchange of recombinant viral DNA with the host chromosome and allowing heterologous genes to be expressed independent of host cell regulation.

[0068] In some embodiments, the OPV vector may be an ectromelia virus (ECTV) vector. No serious case of infection of humans (adults) by ECTV has been reported.

[0069] The ECTV vectors of the invention include recombinant vectors comprising a heterologous nucleotide sequence under control of a viral early/late promoter. Methods and conditions for constructing recombinant poxvirus virus vectors, such as vaccinia virus vectors, are known in the art (see, e.g., Piccini, et al., Methods of Enzymology 153: 545-563, 1987; U.S. Pat. Nos. 4,769,330; 4,722,848; 4,769,330; 4,603,112; 5,110,587; 5,174,993; EP 83 286; EP 206 920; Mayr et al., Infection 3: 6-14, 1975; Sutter and Moss, Proc. Natl. Acad. Sci. USA 89: 10847-10851, 1992).

[0070] A vaccine vector is generally prepared as follows. In one aspect, a donor plasmid comprising a nucleic acid sequence encoding target nucleotide sequence is constructed, amplified by growth in a host cell and isolated by conventional procedures. The donor plasmid comprises a nucleic acid sequence homologous to vaccinia virus sequences. The nucleic acid encoding a target nucleotide sequence is operably linked to an expression control element. In one embodiment, the expression control element comprises viral regulatory elements, including upstream promoter sequences and, where necessary, RNA processing signals. The expression control sequences may be from a vaccinia virus, or other poxvirus, and is operably linked to the heterologous nucleotide sequence encoding the target sequence. The choice of promoter determines both the time (e.g., early or late) and level of expression of the target nucleotide sequence.

[0071] In some embodiments, the target nucleotide sequence is under the control of a viral early/late promoter. In one embodiment, the early/late promoter is a native, or wild-type, promoter from an OPV. In one embodiment, the early/late promoter is a synthetic promoter. Exemplary OPV early/late promotes that can be used include, but are not limited to, 7.5 and H5.

[0072] The expression unit comprising the expression control sequence and target nucleotide sequence is flanked on both ends by DNA homologous to a vaccinia virus DNA sequence being targeted as a recombination site. In some embodiments, the flanking sequences correspond to a nonessential locus in the viral genome. The resulting plasmid construct is then amplified by replication in E. coli or other suitable host and isolated using methods routine in the art (see, e.g., Maniatis, T., Fritsch, E. F., and Sambrook, J., In Molecular Cloning: A Laboratory Manual (Cold Spring Harbor Laboratory, Cold Spring Harbor, N.Y.) (1989)).

[0073] In some embodiments, a suitable cell culture (e.g., chicken embryo fibroblasts, CV-1 cells, BHK-21 cells, 143B tk-cells, vero cells, lung cells, etc.) is transfected with the donor plasmid along with recipient ectromelia virus sequences to select for recombinants that comprise both donor and recipient sequences. In certain instances, transfection may be facilitated by providing one or more molecules for facilitating entry of a nucleic acid into a cell. Suitable delivery vehicles include, but are not limited to: liposomal formulations, polypeptides; polysaccharides; lipopolysaccharides, cationic molecules, cell delivery vehicles, vehicles for facilitating electroporation, and the like.

[0074] In some embodiments, recipient sequences are selected which will result in the production of a recombinant virus that can induce and/or enhance a protective immune response and which lacks any significant pathogenic properties. Therefore, in one embodiment, the recipient sequence comprises one or more genes which are nonessential for growth of the virus in tissue culture and whose deletion or inactivation reduces virulence in a host organism, such as mammal (e.g., such as a mouse or a human being).

[0075] Inactivated virulence associated sequences can comprise whole or partially deleted gene sequences, substitutions, rearrangements, insertions, combinations thereof and the like. Mutations can be engineered or selected for. For example, an attenuated viral strain can be selected for by repeated passages in a suitable host cell and subsequent plaque purification can be used to identify plaques which are smaller, replicate more slowly, or which display other indications of complete or partial attenuation.

[0076] Host restricted viruses such as ECTV viruses can also be used as these are nonvirulent in some mammals, such as humans. In one embodiment, the ECTV vector is an attenuated ECTV, for example, in one embodiment, the attenuated ECTV virus vector is a vector in which the EVM036 protein, which is required for ECTV to spread from cell to cell in tissue culture, has been deleted or inactivated. In one embodiment, the Type I interferon (IFN-I) decoy receptor EVM166 has been deleted or inactivated.

[0077] Recombination between a homologous OPV virus sequence in the donor plasmid and the viral genome results in production of a recombinant OPV vector that comprises the target nucleotide sequence.

[0078] Recombinants can be detected by screening. In one embodiment, the screening method comprises a screen for plaque size, for example using ECTV-delta036 as an acceptor. In one embodiment, recombinants are screened by including reporter gene sequences in the donor plasmid and screening for recombinant viruses that carry these sequences. In one embodiment the reporter gene sequence encodes for a fluorescent reporter protein such as, but not limited to, green fluorescent protein (GFP) or dsRED. In one embodiment, the screening method is a color based screening assay. For example, donor plasmids that contain the E. coli β-galactosidase gene provide a method of distinguishing recombinant from parental viruses (Chakrabarti, et al., Mol. Cell. Biol. 5: 3403, 1985). Plaques formed by such recombinants can be positively identified by the blue color that forms upon addition of an appropriate indicator. Alternatively, or additionally, the recipient sequence comprises a reporter sequence and recombinants are detected by loss of function of the reporter sequence (i.e., resulting from insertion of donor sequences into the recipient sequence). In one aspect, the recipient reporter sequence is a virulence associated gene.

[0079] In some instances, viral particles can be recovered from the culture supernatant or from the cultured cells after a lysis step (e.g., chemical lysis, freezing/thawing, osmotic shock, sonication and the like). Consecutive rounds of plaque purification can be used to remove contaminating wild type virus. In some instances, viral particles can then be purified using the techniques known in the art (e.g., chromatographic methods or by ultracentrifugation on cesium chloride or sucrose gradients).

[0080] Vectors according to the invention may additionally comprise a detectable and/or selectable marker to verify that the vector has been successfully introduced in a target cell. These markers can encode an activity, such as, but not limited to, production of an RNA, peptide, or protein, or can provide a binding site for RNA, peptides, proteins, inorganic and organic compounds or compositions and the like. In some embodiments, the reporter sequence provided by the donor plasmid is used as the marker to verify introduction into a target cell.

[0081] Examples of detectable/selectable markers genes include, but are not limited to, nucleic acid sequences which encode products providing resistance to otherwise toxic compounds (e.g., such as antibiotics); products which are otherwise lacking in a recipient cell (e.g., tRNA genes, auxotrophic markers, and the like); products which suppress the activity of a gene product; enzymes (e.g., such as β-galactosidase or guanine-phosphoribosyl transferase), fluorescent proteins (GFP, CFP, YFG, BFP, RFP, EGFP, EYFP, EBFP, dsRed, mutated, modified, or enhanced forms thereof, and the like); cell surface proteins (i.e., which can be detected by an immunoassay); antisense oligonucleotides; and the like.

[0082] The marker gene can be used as a marker to confirm successful gene transfer by the vaccine vector and/or to isolate recombinants expressing the target nucleotide sequence.

[0083] In one embodiment, the vaccine vector comprises viral capsid molecules to facilitate entry of the vaccine vector into a cell. Additionally, viral capsid molecules may be engineered to include targeting moieties to facilitate targeting and/or selective entry into specific cell types. Suitable targeting molecules, include, but are not limited to: chemical conjugates, lipids, glycolipids, hormones, sugars, polymers (e.g. PEG, polylysine, PEI and the like), peptides, polypeptides, vitamins, lectins, antibodies and fragments thereof. In some embodiments, such targeting molecules recognize and bind to cell-specific markers of antigen presenting cells, such as dendritic cells (e.g., such as CD44) or cancer cells.

[0084] In one embodiment, a viral vector can be used for expression of two or more nucleotide sequences of interest. In one embodiment, two or more nucleic acid sequences or genes of interest are expressed from the same viral early/late promoter. In some embodiments, two or more nucleotide sequences or genes of interest are expressed from different viral promoters.

[0085] Nucleotide sequences that can be expressed using the viral vector of in the invention include, but are not limited to, a sequence encoding an RNA molecule (e.g., mRNA, siRNA, sgRNA, miRNA or shRNA), a sequence encoding a protein, a sequence encoding a peptide, a sequence encoding an antibody or fragment thereof, a sequence encoding a nanobody, a sequence encoding an antigenic polypeptide, and a sequence encoding a therapeutic agent.

[0086] In one embodiment, the target nucleic acid molecule is expressed under the control of a viral early/late promoter. As a result, the virus particle is taken up by a cell prior to expression of the target nucleic acid molecule, and the target nucleic acid molecule is transcribed and translated in the infected cell.

[0087] In one embodiment, the target nucleic acid molecule is expressed in the form of a fusion protein. In one embodiment, the target nucleic acid molecule is integrated into a viral gene such that the target nucleic acid molecule is linked to a gene encoding a marker or a viral protein. Such a vector can be constructed by a standard method using routine recombinant DNA technique.

[0088] In one embodiment, one or more genes that promote evasion of the host immune system are deleted or inactivation, resulting in a viral particle that has increased immunogenicity. Exemplary genes that promote evasion of the host immune system include, but are not limited to, those encoding secreted proteins which can act as either cytokine receptor homologues (viroceptors) or as cytokine mimics (virokines). Examples of viroceptors include the VACV secreted interleukin 1β (IL-1β) binding protein B15 and the interferon (IFN) type I binding protein B18. Virokines include, but are not limited to, the secreted VACV A39 smaphorin, which induces cytokine production from monocytes.

[0089] In one embodiment, the viral vector of the invention has been modified to carry at least one pro-apoptotic or pro-necroptotic gene. Exemplary pro-apoptotic or pro-necroptotic genes that can be included in the vector of the invention include, but are not limited to, CASP3, CASP9, APAF1, BAX, BAK1, BOK, BID, BCL2L11, BIM, BMF, BAD, BIK, HRK, PMAIP1, NOXA, BNIP3, BNIP3L, BCL2L14, BBC3, BCL2L12, BCL2L13, BCL-XS, RIPK1, RIPK3, MLKL, FAS, TRAIL1, TRAIL2 and TNFR-1.

[0090] In one embodiment of the present invention, the vector is an ECTV viral vector, or a fragment or variant thereof. In one embodiment, the ECTV viral vector comprises SEQ ID NO:1, or a fragment or variant thereof. In one embodiment, the ECTV viral vector comprises SEQ ID NO:1, or a fragment or variant thereof, and further comprises a coding sequence for expression of at least one heterologous sequence. An exemplary ECTV viral vector of the invention comprising a heterologous sequence for expression of EGFP is provided in SEQ ID NO:3, in which the coding sequence for EGFP is inserted at nucleotide position 189899 of SEQ ID NO: 1, resulting in the insertion of a coding sequence with an associated deletion of nucleotides 189899-189943 of SEQ ID NO:1. Therefore, in one embodiment, the composition comprises a fragment or variant of SEQ ID NO: 1 comprising about nucleotides 1-189898 and nucleotides 189944-209771 of SEQ ID NO: 1 and further comprising an insertion of a coding sequence for at least one heterologous sequence.

[0091] In one embodiment of the present invention, an EVM036 protein-defective viral vector is used, known as ECTV-Δ036. The EVM036 protein is a protein necessary ECTV to spread from cell to cell. Thus, this virus cannot constitute a virus particle having the ability to multiply autonomously after infection of cells of a subject and does not infect the other cells. The virus is therefore highly safe as a virus for vaccines. In one embodiment, the ECTV-Δ036 viral vector comprises SEQ ID NO:2, or a fragment or variant thereof. In one embodiment, the ECTV-Δ036 viral vector comprises SEQ ID NO:2, or a fragment or variant thereof, and further comprises a coding sequence for expression of at least one heterologous sequence. The ECTV-4036 viral vector provided in SEQ ID NO:2 comprises a deletion of nucleotides 49614-50731 of SEQ ID NO:1. Therefore, in one embodiment, the ECTV-Δ036 viral vector comprises a fragment or variant of SEQ ID NO: 1 comprising about nucleotides 1-49613, 50732-189898, and nucleotides 189944-209771 of SEQ ID NO: 1 and further comprising an insertion of a coding sequence for at least one heterologous sequence at about nucleotide position 189899 of SEQ ID NO:1.

[0092] In one embodiment of the present invention, an EVM166 protein-defective viral vector is used, known as ECTV-Δ166. EVM166 is a secreted decoy receptor that is able to bind Type-I interferons (IFNs) across several species, and promotes evasion of the host immune system in order to allow for survival and propagation of the virus.

### Antigenic Polypeptides

[0093] In one embodiment, the viral vector of the invention comprises a nucleotide sequence encoding an antigenic polypeptide. In one embodiment, the term “antigenic polypeptide” refers to a polypeptide that can induce or promote an immune response in a subject administered the virus vector of the present invention. For example, in certain embodiments, the antigen is associated with a cancer/tumor antigen, autoantigen (e.g., such as antigens recognized in transplant rejection); allergen; an antigen associated with hypersensitivity; prion antigen; viral antigen; a bacterial antigen, an antigen from protozoa or fungi; and a parasitic antigen.

### Viral Antigens

[0094] In certain embodiments, the antigen is a viral antigen, or fragment thereof, or variant thereof. For example, in some embodiments, the viral antigen is from a virus from one of the following families: Adenoviridae, Arenaviridae, Bunyaviridae, Caliciviridae, Coronaviridae, Filoviridae, Hepadnaviridae, Herpesviridae, Orthomyxoviridae, Papovaviridae, Paramyxoviridae, Parvoviridae, Picornaviridae, Poxviridae, Reoviridae, Retroviridae, Rhabdoviridae, or Togaviridae. In some embodiments, the viral antigen is from human immunodeficiency virus (HIV), Chikungunya virus (CHIKV), dengue fever virus, papilloma viruses, for example, human papilloma virus (HPV), polio virus, hepatitis viruses, for example, hepatitis A virus (HAV), hepatitis B virus (HBV), hepatitis C virus (HCV), hepatitis D virus (HDV), and hepatitis E virus (HEV), smallpox virus (Variola major and minor), vaccinia virus, influenza virus, rhinoviruses, equine encephalitis viruses, rubella virus, yellow fever virus, Norwalk virus, hepatitis A virus, human T-cell leukemia virus (HTLV-I), hairy cell leukemia virus (HTLV-II), California encephalitis virus, Hanta virus (hemorrhagic fever), rabies virus, Ebola fever virus, Marburg virus, measles virus, mumps virus, respiratory syncytial virus (RSV), Middle Eastern respiratory virus (MERS), Middle Eastern respiratory virus (MERS), severe acute respiratory syndrome coronavirus (SARS), severe acute respiratory syndrome coronavirus 2 (SARS-CoV-2), herpes simplex 1 (oral herpes), herpes simplex 2 (genital herpes), herpes zoster (varicella-zoster, a.k.a., chickenpox), cytomegalovirus (CMV), for example human CMV, Epstein-Barr virus (EBV), flavivirus, foot and mouth disease virus, lassa virus, arenavirus, or cancer causing virus. For example, in one embodiment, the antigenic polypeptide useful for use as a vaccine for SARS-CoV-2 infection is SARS-CoV-2 spike protein or a fragment thereof comprising the receptor binding domain (RBD).

### Bacterial Antigens

[0095] In certain embodiments, the antigen is a bacterial antigen or fragment or variant thereof. In some embodiments, the bacterial antigen is from a bacterium from any one of the following phyla: Acidobacteria, Actinobacteria, Aquificae, Bacteroidetes, Caldiserica, Chlamydiae, Chlorobi, Chloroflexi, Chrysiogenetes, Cyanobacteria, Deferribacteres, Deinococcus-Thermus, Dictyoglomi, Elusimicrobia, Fibrobacteres, Firmicutes, Fusobacteria, Gemmatimonadetes, Lentisphaerae, Nitrospira, Planctomycetes, Proteobacteria, Spirochaetes, Synergistetes, Tenericutes, Thermodesulfobacteria, Thermotogae, and Verrucomicrobia.

[0096] The bacterium can be a gram positive bacterium or a gram negative bacterium. The bacterium can be an aerobic bacterium or an anerobic bacterium. The bacterium can be an autotrophic bacterium or a heterotrophic bacterium. The bacterium can be a mesophile, a neutrophile, an extremophile, an acidophile, an alkaliphile, a thermophile, a psychrophile, a halophile, or an osmophile.

[0097] The bacterium can be an anthrax bacterium, an antibiotic resistant bacterium, a disease causing bacterium, a food poisoning bacterium, an infectious bacterium, Salmonella bacterium, Staphylococcus bacterium, Streptococcus bacterium, or tetanus bacterium. The bacterium can be a mycobacteria, Clostridium tetani, Yersinia pestis, Bacillus anthracis, methicillin-resistant Staphylococcus aureus (MRSA), or Clostridium difficile.

### Parasitic Antigens

[0098] In certain embodiments, the antigen is a parasite antigen or fragment or variant thereof. In some embodiments, the parasite antigen is of a parasite from any one of a protozoa, helminth, or ectoparasite. The helminth (i.e., worm) can be a flatworm (e.g., flukes and tapeworms), a thorny-headed worm, or a round worm (e.g., pinworms). The ectoparasite can be lice, fleas, ticks, and mites.

[0099] The parasite can be any parasite causing any one of the following diseases: Acanthamoeba keratitis, Amoebiasis, Ascariasis, Babesiosis, Balantidiasis, Baylisascariasis, Chagas disease, Clonorchiasis, Cochliomyia, Cryptosporidiosis, Diphyllobothriasis, Dracunculiasis, Echinococcosis, Elephantiasis, Enterobiasis, Fascioliasis, Fasciolopsiasis, Filariasis, Giardiasis, Gnathostomiasis, Hymenolepiasis, Isosporiasis, Katayama fever, Leishmaniasis, Lyme disease, Malaria, Metagonimiasis, Myiasis, Onchocerciasis, Pediculosis, Scabies, Schistosomiasis, Sleeping sickness, Strongyloidiasis, Taeniasis, Toxocariasis, Toxoplasmosis, Trichinosis, and Trichuriasis.

[0100] The parasite can be Acanthamoeba, Anisakis, Ascaris lumbricoides, Botfly, Balantidium coli, Bedbug, Cestoda (tapeworm), Chiggers, Cochliomyia hominivorax, Entamoeba histolytica, Fasciola hepatica, Giardia lamblia, Hookworm, Leishmania, Linguatula serrata, Liver fluke, Loa loa, Paragonimus—lung fluke, Pinworm, Plasmodium falciparum, Schistosoma, Strongyloides stercoralis, Mite, Tapeworm, Toxoplasma gondii, Trypanosoma, Whipworm, or Wuchereria bancrofti.

### Fungal Antigens

[0101] In certain embodiments, the antigen is a fungal antigen or fragment or variant thereof. The fungus can be Aspergillus species, Blastomyces dermatitidis, Candida yeasts (e.g., Candida albicans), Coccidioides, Cryptococcus neoformans, Cryptococcus gattii, dermatophyte, Fusarium species, Histoplasma capsulatum, Mucoromycotina, Pneumocystis jirovecii, Sporothrix schenckii, Exserohilum, or Cladosporium.

### Self Antigens

[0102] In some embodiments, the antigen is a self-antigen or a variant or fragment thereof. A self-antigen may be a constituent of the subject's own body that is capable of stimulating an immune response. In some embodiments, a self-antigen does not provoke an immune response unless the subject is in a disease state, e.g., an autoimmune disease.

[0103] In some embodiments, self-antigens may include, but are not limited to, cytokines, antibodies against viruses such as those listed above including HIV and Dengue, antigens affecting cancer progression or development, and cell surface receptors or transmembrane proteins.

[0104] In some embodiments, the antigen is a tumor antigen, such as a tumor-associated antigen (TAA) or tumor-specific antigen (TSA), or a variant or fragment thereof. Tumor antigens are proteins that are produced by tumor cells that elicit an immune response, particularly T-cell mediated immune responses. Tumor antigens are well known in the art and include, but are not limited to, a glioma-associated antigen, carcinoembryonic antigen (CEA), β-human chorionic gonadotropin, alphafetoprotein (AFP), lectin-reactive AFP, thyroglobulin, RAGE-1, MN-CA IX, human telomerase reverse transcriptase, RU1, RU2 (AS), intestinal carboxyl esterase, mut hsp70-2, M-CSF, prostase, prostate-specific antigen (PSA), PAP, NY-ESO-1, LAGE-1a, p53, prostein, PSMA, Her2/neu, survivin and telomerase, prostate-carcinoma tumor antigen-1 (PCTA-1), MAGE, ELF2M, neutrophil elastase, ephrinB2, CD22, insulin growth factor (IGF)-I, IGF-II, IGF-I receptor and mesothelin.

[0105] Illustrative examples of a tumor associated surface antigen are CD10, CD19, CD20, CD22, CD33, Fms-like tyrosine kinase 3 (FLT-3, CD135), chondroitin sulfate proteoglycan 4 (CSPG4, melanoma-associated chondroitin sulfate proteoglycan), Epidermal growth factor receptor (EGFR), Her2neu, Her3, IGFR, CD133, IL3R, fibroblast activating protein (FAP), CDCP1, Derlin1, Tenascin, frizzled 1-10, the vascular antigens VEGFR2 (KDR/FLK1), VEGFR3 (FLT4, CD309), PDGFR-α (CD140a), PDGFR-.beta. (CD140b) Endoglin, CLEC14, Tem1-8, and Tie2. Further examples may include A33, CAMPATH-1 (CDw52), Carcinoembryonic antigen (CEA), Carboanhydrase IX (MN/CA IX), CD21, CD25, CD30, CD34, CD37, CD44v6, CD45, CD133, de2-7 EGFR, EGFRVIII, EpCAM, Ep-CAM, Folate-binding protein, G250, Fms-like tyrosine kinase 3 (FLT-3, CD135), c-Kit (CD117), CSF1R (CD115), HLA-DR, IGFR, IL-2 receptor, IL3R, MCSP (Melanoma-associated cell surface chondroitin sulphate proteoglycane), Muc-1, Prostate-specific membrane antigen (PSMA), Prostate stem cell antigen (PSCA), Prostate specific antigen (PSA), and TAG-72. Examples of antigens expressed on the extracellular matrix of tumors are tenascin and the fibroblast activating protein (FAP).

[0106] Non-limiting examples of TSA or TAA antigens include the following: Differentiation antigens such as MART-1/MelanA (MART-I), gp100 (Pmel 17), tyrosinase, TRP-1, TRP-2 and tumor-specific multilineage antigens such as MAGE-1, MAGE-3, BAGE, GAGE-1, GAGE-2, p15; overexpressed embryonic antigens such as CEA; overexpressed oncogenes and mutated tumor-suppressor genes such as p53, Ras, HER-2/neu; unique tumor antigens resulting from chromosomal translocations; such as BCR-ABL, E2A-PRL, H4-RET, IGH-IGK, MYL-RAR; and viral antigens, such as the Epstein Barr virus antigens EBVA and the human papillomavirus (HPV) antigens E6 and E7. Other large, protein-based antigens include TSP-180, MAGE-4, MAGE-5, MAGE-6, RAGE, NY-ESO, p185erbB2, p180erbB-3, c-met, nm-23H1, PSA, TAG-72, CA 19-9, CA 72-4, CAM 17.1, NuMa, K-ras, beta-Catenin, CDK4, Mum-1, p 15, p 16, 43-9F, 5T4, 791Tgp72, alpha-fetoprotein, beta-HCG, BCA225, BTAA, CA 125, CA 15-3\CA 27.29\BCAA, CA 195, CA 242, CA-50, CAM43, CD68\P1, CO-029, FGF-5, G250, Ga733\EpCAM, HTgp-175, M344, MA-50, MG7-Ag, MOV18, NB/70K, NY-CO-1, RCAS1, SDCCAG16, TA-90\Mac-2 binding protein\cyclophilin C-associated protein, TAAL6, TAG72, TLP, and TPS.

### Antibodies

[0107] In one embodiment, the viral expression vector of the invention can be used for expression of a synthetic antibody, a fragment thereof, or a variant thereof. The antibody, or fragment thereof, can bind or react with an antigen. In some embodiments, the antibody can treat, prevent, and/or protect against disease, such as an infection or cancer, in the subject administered a composition of the invention.

[0108] In some embodiments, the antibody may comprise a heavy chain and a light chain complementarity determining region (“CDR”) set, respectively interposed between a heavy chain and a light chain framework (“FR”) set which provide support to the CDRs and define the spatial relationship of the CDRs relative to each other. The CDR set may contain three hypervariable regions of a heavy or light chain V region. Proceeding from the N-terminus of a heavy or light chain, these regions are denoted as “CDR1,” “CDR2,” and “CDR3,” respectively. An antigen-binding site, therefore, may include six CDRs, comprising the CDR set from each of a heavy and a light chain V region.

[0109] The proteolytic enzyme papain preferentially cleaves IgG molecules to yield several fragments, two of which (the F(ab) fragments) each comprise a covalent heterodimer that includes an intact antigen-binding site. The enzyme pepsin is able to cleave IgG molecules to provide several fragments, including the F(ab′)2 fragment, which comprises both antigen-binding sites. Accordingly, the antibody can be the Fab or F(ab′)2. The Fab can include the heavy chain polypeptide and the light chain polypeptide. The heavy chain polypeptide of the Fab can include the VH region and the CH1 region. The light chain of the Fab can include the VL region and CL region.

[0110] The antibody can be an immunoglobulin (Ig). The Ig can be, for example, IgA, IgM, IgD, IgE, and IgG. The immunoglobulin can include the heavy chain polypeptide and the light chain polypeptide. The heavy chain polypeptide of the immunoglobulin can include a VH region, a CH1 region, a hinge region, a CH2 region, and a CH3 region. The light chain polypeptide of the immunoglobulin can include a VL region and CL region.

[0111] The antibody can be a polyclonal or monoclonal antibody. The antibody can be a chimeric antibody, a single chain antibody, an ScFv antibody, a nanobody, an affinity matured antibody, a human antibody, a humanized antibody, or a fully human antibody. The humanized antibody can be an antibody from a non-human species that binds the desired antigen having one or more complementarity determining regions (CDRs) from the non-human species and framework regions from a human immunoglobulin molecule.

[0112] As described above, the antibody can be generated in the subject upon administration of the composition to the subject. The antibody may have a half-life within the subject. In some embodiments, the antibody may be modified to extend or shorten its half-life within the subject.

[0113] In one embodiment, the viral expression vector of the invention can be used for expression of a nucleotide sequence encoding a bispecific antibody, a fragment thereof, a variant thereof, or a combination thereof. The bispecific antibody can bind or react with two desired target molecules, including, but not limited to, an antigen, a ligand, a receptor, a ligand-receptor complex, and a marker (e.g., a cancer marker.)

### Methods

[0114] In one embodiment, the present invention provides a method for producing a modified OPV for expression of a target nucleic acid molecule from an early/late viral promoter. This method comprises the steps of: coculturing, with a cell, an OPV in which a target nucleic acid molecule is integrated in the viral vector under the control of an early/late promoter; and isolating a virus particle from the culture supernatant.

[0115] In one embodiment, the virus vector of the present invention has undergone nucleic acid inactivation treatment. The nucleic acid inactivation treatment refers to the inactivation of only the virus genome in the state where the three-dimensional structures of envelope proteins such as F protein and HN protein are maintained and these proteins have their functions. The nucleic acid inactivation treatment can be carried out by, for example, nucleic acid-alkylating agent treatment (e.g., β-propiolactone), hydrogen peroxide treatment, UV irradiation, exposure to radiation, or heat treatment. In one embodiment, the virus lacks the ability to multiply and thus cannot multiply in a recipient even if the live virus remains after the drug treatment; thus, the high safety of the inactivated vaccine can be kept.

### Methods of Vaccination

[0116] In one embodiment, the invention includes methods of inducing an immune response in a subject in need thereof comprising administering a viral vector of the invention, wherein the vector comprises a nucleotide sequence encoding an immunogenic protein or peptide. In one embodiment, a viral vector of the invention, wherein the vector comprises a nucleotide sequence for an immunogenic protein or peptide, serves a vaccine. Also provided herein is a method of treating, protecting against, and/or preventing disease in a subject in need thereof by administering the vaccine to the subject. Administration of the vaccine to the subject can induce or elicit an immune response in the subject. The induced immune response can be used to treat, prevent, and/or protect against disease, for example, cancer or an infectious disease, including but not limited to pathologies relating to SARS-CoV-2 infection. In one embodiment, the pathology relating to SARS-CoV-2 infection is COVID-19.

[0117] The induced immune response can be used to treat, prevent, and/or protect against cancer. The following are non-limiting examples of cancers that can be treated by the disclosed methods and compositions: acute lymphoblastic leukemia, acute myeloid leukemia, adrenocortical carcinoma, appendix cancer, basal cell carcinoma, bile duct cancer, bladder cancer, bone cancer, brain and spinal cord tumors, brain stem glioma, brain tumor, breast cancer, bronchial tumors, burkitt lymphoma, carcinoid tumor, central nervous system atypical teratoid/rhabdoid tumor, central nervous system embryonal tumors, central nervous system lymphoma, cerebellar astrocytoma, cerebral astrocytoma/malignant glioma, cerebral astrocytotna/malignant glioma, cervical cancer, childhood visual pathway tumor, chordoma, chronic lymphocytic leukemia, chronic myelogenous leukemia, chronic myeloproliferative disorders, colon cancer, colorectal cancer, craniopharyngioma, cutaneous cancer, cutaneous t-cell lymphoma, endometrial cancer, ependymoblastoma, ependymoma, esophageal cancer, ewing family of tumors, extracranial cancer, extragonadal germ cell tumor, extrahepatic bile duct cancer, extrahepatic cancer, eye cancer, fungoides, gallbladder cancer, gastric (stomach) cancer, gastrointestinal cancer, gastrointestinal carcinoid tumor, gastrointestinal stromal tumor (gist), germ cell tumor, gestational cancer, gestational trophoblastic tumor, glioblastoma, glioma, hairy cell leukemia, head and neck cancer, hepatocellular (liver) cancer, histiocytosis, hodgkin lymphoma, hypopharyngeal cancer, hypothalamic and visual pathway glioma, hypothalamic tumor, intraocular (eye) cancer, intraocular melanoma, islet cell tumors, kaposi sarcoma, kidney (renal cell) cancer, langerhans cell cancer, langerhans cell histiocytosis, laryngeal cancer, leukemia, lip and oral cavity cancer, liver cancer, lung cancer, lymphoma, macroglobulinemia, malignant fibrous histiocytoma of bone and osteosarcoma, medulloblastoma, medulloepithelioma, melanoma, merkel cell carcinoma, mesothelioma, metastatic squamous neck cancer with occult primary, mouth cancer, multiple endocrine neoplasia syndrome, multiple myeloma, mycosis, myelodysplastic syndromes, myelodysplastic/myeloproliferative diseases, myelogenous leukemia, myeloid leukemia, myeloma, myeloproliferative disorders, nasal cavity and paranasal sinus cancer, nasopharyngeal cancer, neuroblastoma, non-hodgkin lymphoma, non-small cell lung cancer, oral cancer, oral cavity cancer, oropharyngeal cancer, osteosarcoma and malignant fibrous histiocytoma, osteosarcoma and malignant fibrous histiocytoma of bone, ovarian, ovarian cancer, ovarian epithelial cancer, ovarian germ cell tumor, ovarian low malignant potential tumor, pancreatic cancer, papillomatosis, paraganglioma, parathyroid cancer, penile cancer, pharyngeal cancer, pheochromocytoma, pineal parenchymal tumors of intermediate differentiation, pineoblastoma and supratentorial primitive neuroectodermal tumors, pituitary tumor, plasma cell neoplasm, plasma cell neoplasm/multiple myeloma, pleuropulmonary blastoma, primary central nervous system cancer, primary central nervous system lymphoma, prostate cancer, rectal cancer, renal cell (kidney) cancer, renal pelvis and ureter cancer, respiratory tract carcinoma involving the nut gene on chromosome 15, retinoblastoma, rhabdomyosarcoma, salivary gland cancer, sarcoma, sezary syndrome, skin cancer (melanoma), skin cancer (nonmelanoma), skin carcinoma, small cell lung cancer, small intestine cancer, soft tissue cancer, soft tissue sarcoma, squamous cell carcinoma, squamous neck cancer, stomach (gastric) cancer, supratentorial primitive neuroectodermal tumors, supratentorial primitive neuroectodermal tumors and pineoblastoma, T-cell lymphoma, testicular cancer, throat cancer, thymoma and thymic carcinoma, thyroid cancer, transitional cell cancer, transitional cell cancer of the renal pelvis and ureter, trophoblastic tumor, urethral cancer, uterine cancer, uterine sarcoma, vaginal cancer, visual pathway and hypothalamic glioma, vulvar cancer, waldenstrom macroglobulinemia, and wilms tumor.

[0118] In one embodiment, the methods of the invention include administering a viral vector to a subject wherein the viral vector comprises an expression construct for expression of at least one antigenic protein or peptide, wherein the antigenic protein or peptide promotes the generation of an immune response against the encoded antigenic protein or peptide. In one embodiment, the methods of the invention include administering a viral vector to a subject wherein the viral vector comprises an expression construct for expression of at least one antigenic protein or peptide, wherein the antigenic protein or peptide promotes the generation of an immune response against an antigen that is not encoded. For example, in one embodiment, a viral vector of the invention encoding an antigen of a virus that the subject has previously been infected with or immunized against is administered to a subject to induce an immune response against a different disease or disorder or different infectious agent. In an exemplary embodiment, a viral vector of the invention encoding an antigen of a virus that the subject has previously been infected with or immunized against is administered to a tumor of a subject to induce an immune response in the tumor which can be harnessed for the treatment of the tumor.

[0119] In one embodiment, the methods of the invention include administering a viral vector to a subject wherein the viral vector comprises an expression construct for expression of two or more antigenic proteins or peptides, wherein the expression of the two or more antigenic proteins or peptides promotes the generation of an immune response against the encoded antigenic proteins or peptides. In some embodiments, two or more encoded antigenic proteins or peptides are peptides or proteins of the same infectious agent (e.g., the same virus). In some embodiments, two or more encoded antigenic proteins or peptides are peptides or proteins of different infectious agents (e.g., two or more different viruses or two or more different clades of the same virus). In some embodiments, two or more encoded antigenic proteins or peptides are peptides or proteins associated with the same disease or disorder (e.g., two or more antigenic proteins or peptides associated with the same cancer.) In some embodiments, two or more encoded antigenic proteins or peptides are peptides or proteins associated with different diseases or disorders. For example, in one embodiment, the viral vector comprises an expression construct encoding a first antigenic protein or peptide associated with a viral infection and a second antigenic protein or peptide associated with cancer (e.g., a combination of an influenza antigen and a cancer antigen or a combination of a human cytomegalovirus antigen and a cancer antigen.) In such an embodiment, the immune response induced against the encoded viral antigen is harnessed for use against the cancer associated with the encoded cancer antigen.

[0120] The induced immune response can include an induced humoral immune response and/or an induced cellular immune response. The humoral immune response can be induced by about 1.5-fold to about 16-fold, about 2-fold to about 12-fold, or about 3-fold to about 10-fold. The induced humoral immune response can include IgG antibodies and/or neutralizing antibodies. The induced cellular immune response can include a CD8⁺ T cell response, which is induced by about 2-fold to about 30-fold, about 3-fold to about 25-fold, or about 4-fold to about 20-fold.

[0121] The vaccine dose can be between 1 μg to 10 mg active component/kg body weight/time, and can be 20 μg to 10 mg component/kg body weight/time. The vaccine can be administered every 1, 2, 3, 4, 5, 6, 7, 8, 9, 10, 11, 12, 13, 14, 15, 16, 17, 18, 19, 20, 21, 22, 23, 24, 25, 26, 27, 28, 29, 30, or 31 days. The number of vaccine doses for effective treatment can be 1, 2, 3, 4, 5, 6, 7, 8, 9, or 10.

[0122] In one embodiment, the viral vector of the invention for expression of at least one antigenic polypeptide can be administered alone. In one embodiment, the viral vector of the invention for expression of at least one antigenic polypeptide can be administered in combination with another treatment for a disease or disorder.

[0123] In one embodiment the viral vector of the invention for expression of at least one antigenic polypeptide is administered in combination with an additional vaccine composition as a prime or a boost vaccine. In one embodiment, a subject who has been immunized with a vaccine (as a priming vaccine) is then administered a viral vector of the invention expressing at least one antigenic polypeptide as a boosting vaccine to increase the immune response.

[0124] In one embodiment the viral vector expresses at least two antigenic polypeptides, wherein at least one antigenic polypeptide is specific for a virus that a subject has been immunized against or for a common virus to which the subject likely has immunity. Therefore, in one embodiment, the viral vector of the invention is administered to a subject who has previously been immunized, wherein the viral vector comprises at least one antigenic polypeptide of a virus that the subject was immunized against and at least one additional antigenic polypeptide. In such an embodiment, the vaccine of the invention promotes an immune response against both the antigenic polypeptide of the virus that the subject was previously immunized against and the additional antigenic polypeptide.

### Administration

[0125] The compositions of the invention can be formulated in accordance with standard techniques well known to those skilled in the pharmaceutical art. Such compositions can be administered in dosages and by techniques well known to those skilled in the medical arts taking into consideration such factors as the age, sex, weight, and condition of the particular subject, and the route of administration. The subject can be a mammal, such as a human, a horse, a cow, a pig, a sheep, a cat, a dog, a rat, or a mouse.

[0126] The composition can be administered prophylactically or therapeutically. In prophylactic administration, the compositions can be administered in an amount sufficient to induce an immune response. In therapeutic applications, the compositions are administered to a subject in need thereof in an amount sufficient to elicit a therapeutic effect. An amount adequate to accomplish this is defined as “therapeutically effective dose.” Amounts effective for this use will depend on, e.g., the particular composition of the treatment regimen administered, the manner of administration, the stage and severity of the disease, the general state of health of the patient, and the judgment of the prescribing physician.

[0127] The composition can be administered by methods well known in the art as described in Donnelly et al. (Ann. Rev. Immunol. 15:617-648 (1997)); Felgner et al. (U.S. Pat. No. 5,580,859, issued Dec. 3, 1996); Felgner (U.S. Pat. No. 5,703,055, issued Dec. 30, 1997); and Carson et al. (U.S. Pat. No. 5,679,647, issued Oct. 21, 1997), the contents of all of which are incorporated herein by reference in their entirety. One skilled in the art would know that the choice of a pharmaceutically acceptable carrier, including a physiologically acceptable compound, depends, for example, on the route of administration of the expression vector.

[0128] The composition can be delivered via a variety of routes. Typical delivery routes include parenteral administration, e.g., intradermal, intramuscular, intratumoral or subcutaneous delivery. Other routes include oral administration, intranasal, and intravaginal routes. For the DNA of the composition in particular, the composition can be delivered to the interstitial spaces of tissues of an individual (Felgner et al., U.S. Pat. Nos. 5,580,859 and 5,703,055, the contents of all of which are incorporated herein by reference in their entirety). The composition can also be administered to muscle, or can be administered via intradermal or subcutaneous injections, or transdermally, such as by iontophoresis. Epidermal administration of the composition can also be employed. Epidermal administration can involve mechanically or chemically irritating the outermost layer of epidermis to stimulate an immune response to the irritant (Carson et al., U.S. Pat. No. 5,679,647, the contents of which are incorporated herein by reference in its entirety).

[0129] In one embodiment, the modified OPV of the present invention can be administered to cells of a mammal including a human.

[0130] In some embodiments, the viral vector of the present invention can be administered as an injection (subcutaneous, intradermal, or intramuscular injection) to cells of a mammal including a human. The injection can be prepared by a standard method. For example, a culture supernatant containing the virus vector is concentrated, if necessary, and suspended together with an appropriate carrier or excipient in a buffer solution such as PBS or saline. Then, the suspension can be sterilized by filtration through a filter or the like according to the need and subsequently charged into an aseptic container to prepare the injection. The injection may be supplemented with a stabilizer, a preservative, and the like, according to the need. The expression vector thus obtained can be administered as the injection to a subject.

[0131] In some embodiments, the viral vector can be formulated for administration by way of intradermal (ID) vaccination (e.g., ID injection by the Mantoux technique, use of a hollow microneedle, using a gene gun, using scarification or by other methods for ID delivery). The formulation for ID vaccination can be prepared by a standard method. For example, a culture supernatant containing the virus vector is concentrated, if necessary, and suspended together with an appropriate carrier or excipient in a buffer solution such as PBS, a virus vector-stabilizing solution, or saline. Then, the suspension can be sterilized by filtration through a filter or the like according to the need and subsequently charged into an aseptic container to prepare the formulation for ID vaccination. The formulation for ID vaccination may be supplemented with a stabilizer, a preservative, and the like, according to the need. The expression vector thus obtained can be administered intradermally to a subject.

[0132] The invention also provides a method for generating an immune response in an animal comprising administering any of the recombinant virus vectors or compositions described above to an animal in an amount effective to stimulate the immune response. In one embodiment, the immune response comprises one or more of the production of memory CD8+ T cells specific for an expressed target antigen, the production of memory CD4+ T cells specific for an expressed target antigen, and the production of antibodies specific for an expressed target antigen. In one embodiment, at least some of the antibodies are neutralizing antibodies.

[0133] In one embodiment, the animal is a human being. In one embodiment, the animal is a domestic animal such as a dog or cat. The animal may also be a feral or wild animal such as mink. The animal may also be a non-human primate.

[0134] The method may be used to provide a prophylactic or therapeutic composition to a patient at risk for being infected with or already infected with a viral agent, such as SARS-CoV-2. In one aspect, the method is used to provide a prophylactic vaccine to an individual at high risk of SARS-CoV-2 infection and the vaccine may be administered to an individual who is not SARS-CoV-2 positive at the time of first administration. However, the vaccine may also be administered to an individual who is SARS-CoV-2 positive at the time of first administration.

[0135] In one embodiment, the method may be used to provide an immunotherapeutic vaccine for the treatment of cancer, and thus induce an immune response against one or more cancer antigen. In one embodiment, the immune response comprises one or more of the production of memory CD8+ T cells specific for an expressed cancer antigen, the production of memory CD4+ T cells specific for an expressed cancer antigen, and the production of antibodies specific for an expressed cancer antigen.

[0136] The invention further provides pharmaceutical compositions (e.g., vaccines) comprising recombinant OPV vectors of the invention. In one embodiment, the composition comprises a pharmaceutically acceptable diluent, carrier, or excipient carrier. The composition may also contain an aqueous medium or a water-containing suspension, to increase the activity and/or the shelf life of the composition. The medium/suspension can include salt, glucose, pH buffers, stabilizers, emulsifiers, and preservatives.

[0137] In some embodiments, the composition further comprises an adjuvant, e.g., including, but not limited to: muramyl dipeptide; aluminum hydroxide; saponin; polyanions; anamphipatic substances; bacillus Calmette-Guerin (BCG); endotoxin lipopolysaccharides; keyhole limpet hemocyanin (GKLH); and cytoxan.

[0138] The invention also encompasses a kit including a OPV vector of the invention. The recombinant OPV vector can be provided in lyophilized form for reconstituting, for instance, in an isotonic aqueous, saline buffer. The kit can include a separate container containing a suitable carrier, diluent or excipient. The kit can also include one or more additional therapeutic agent, such as anti-cancer agents; agents for ameliorating symptoms of a viral infection (e.g., such as a protease inhibitor, Cimetidine (Smith/Kline, Pa.), low-dose cyclophospharide (Johnson/Mead, N.J.); and the like); and genes encoding proteins providing immune helper functions (such as B-7); and the like. Additionally, the kit can include instructions for mixing or combining ingredients and/or administering the kit components.

[0139] In one aspect, the invention provides a method of administering a therapeutically effective compositions according to the invention. The desired therapeutic effect comprises one or more of: reducing or eliminating viral load, increasing numbers of CD4+ and/or CD8+ T cells or antibodies which recognize the encoded antigen; increasing overall levels of CD4+ T cells; increasing levels of neutralizing antibodies which recognize the antigen; decreasing the number of or severity of symptoms of a disease; decreasing the expression of a cancer specific marker; decreasing size or rate of growth of a tumor; preventing metastasis of a tumor; preventing infection by a pathogenic organism; and the like. The therapeutic effect may be monitored by evaluating biological markers and/or abnormal physiological responses. Generally, an effective dose of a composition according to the invention comprises a titer that can modulate an immune response against the encoded antigen such that memory T cells are generated which are specific for the encoded antigen.

[0140] Both the dose and the administration means can be determined based on the condition of the patient (e.g., age, weight, general health), risk for developing a disease, or the state of progression of a disease.

[0141] In one embodiment, an effective amount of recombinant virus ranges from about 10 μl to about 25 μl of saline solution containing concentrations, of from about 1×10¹⁰ to 1×10¹¹ plaque forming units (pfa) virus/ml.

[0142] In one embodiment of the invention, a priming immunization is performed, followed, optionally, by a booster immunization at about 3-4 weeks after the priming immunization. However, subsequent immunizations need not be provided until at least about 4 months, about 6 months, about 8 months, about 12 months, about 10 months, about 16 months, about 18 months, or about 24 months after the priming boost. In one aspect, the composition is a prophylactic vaccine, administered to a patient who has not been exposed to the vaccine antigen, e.g., such as to an individual who is SARS-CoV-2 negative. In another aspect, the vaccine is administered therapeutically, to a person who is seropositive for the vaccine antigen (although not necessarily displaying symptoms) (i.e., such as to a SARS-CoV-2 positive individual).

### EXPERIMENTAL EXAMPLES

[0143] The invention is further described in detail by reference to the following experimental examples. These examples are provided for purposes of illustration only, and are not intended to be limiting unless otherwise specified. Thus, the invention should in no way be construed as being limited to the following examples, but rather, should be construed to encompass any and all variations which become evident as a result of the teaching provided herein.

[0144] Without further description, it is believed that one of ordinary skill in the art can, using the preceding description and the following illustrative examples, make and utilize the present invention and practice the claimed methods. The following working examples therefore are not to be construed as limiting in any way the remainder of the disclosure.

### Example 1: Engineered ECTV Expresses Protein In Vivo and Induces an Immune Response

[0145] Orthopoxviruses (OPVs) use a large variety of proteins for cell entry, allowing them to infect a wide variety of cells (Moss et al., 2012, Viruses, 4(5):688-707). Thus, OPVs, including ECTV, can probably penetrate most mammalian cells. However, OPVs' capacity for productive infection is mediated by a large number of host-restriction genes that must be expressed in the infected cell (Oliveira et al., 2017, Viruses, 9(11):331). Consequently, the control of OPV in non-permissive hosts occurs after viral entry and before or soon after DNA replication. OPVs encode early genes that are transcribed from incoming virions before DNA replication, late genes that are transcribed after DNA replication, and early/late genes that are transcribed before and after viral replication (Meade et al., 2019, Wiley Interdiscip Rev RNA, 10(2): e1515). It is then plausible that ECTV in non-mouse cells can express early and early/late but not late genes. Without being bound by any particular scientific theory, it is hypothesized that proteins introduced into ECTV using an early/late promoter will be expressed from the incoming virions to induce immune responses but that the virus will not replicate in non-permissive hosts such as rats, hamsters, and humans. In support of this hypothesis, in rats inoculated intramuscularly with ECTV expressing firefly luciferase (ECTV-Luc) as a reporter, Luc activity was transiently observed at the infection site (FIG. 1A-B). While the virus did not spread, the rats mounted a robust antibody response to the virus and a weaker response to luciferase (FIG. 1B). These results indicate that ECTV is a suitable vector to induce immune responses in non-permissive species, such as humans. Importantly, due to non-permissivity, it is hypothesized that ECTV-based vaccines will likely be very safe. Moreover, if necessary, one could easily remove immune-evasion genes from ECTV to make it even safer and possibly more immunogenic (Xu et al., 2008, The Journal of experimental medicine, 205(4):981-92; Roscoe et al., 2012, Journal of virology, 86(24): 13501-7; Rubio et al., 2013, Cell host & microbe, 13(6):701-10; Remakus et al., 2018, Journal of immunology, 200(10):3347-52).

### Example 2: OPVs Infect Human and Rat Tumor Cells

[0146] Despite their inability to systemically infect rats or humans, both VACV and ECTV were found to infect and lyse human (LNCaP) and rat (AY-27) tumor cells in vitro (FIG. 2). Further, luciferase produced by ECTV-Luc injected into rat AY-27 tumors remained localized to the site of the tumor, demonstrating the specificity of ECTV infection in vivo (FIG. 3). In addition, VACV injected into mouse mammary adenocarcinoma cell (TS/A) tumors of control and naïve (VV it) BALB/c mice had no significant ability to suppress tumor growth (FIG. 4). However, VACV injected into TS/A tumors of BALB/c mice that had previously been vaccinated against VACV (immunized-VV it) significantly inhibited tumor growth. Overall, these results suggest that OPVs, including ECTV and VACV, can prove useful as cancer immunotherapies to suppress tumor growth in vivo.

### Example 3: Combination Virus and Tumor Targeted Therapeutic

[0147] While the maximum insert size in ECTV has not been tested, VACV can accommodate at least 35 Kb. While not being bound by any particular scientific theory, it is therefore hypothesized that ECTV can accommodate similarly sized inserts.

[0148] Despite to its inability to infect other species, ECTV can infect human and rat tumor cell lines in vitro, and rat tumors in vivo without spreading to other tissues. Using the similar VACV, it was also found that rats pre-immune to VACV can eliminate tumors after intra-tumoral VACV infection. While not being bound by any particular scientific theory, it is hypothesized that this anti-tumor effect is not mediated by direct lysis of tumor cells but initially by anti-VACV CD8 T cells and likely continues through epitope spread to bona-fide tumor antigens. One might reasonably expect that the same will occur with ECTV in humans immunized with ECTV. Thus, while this approach could work with VACV, the use of ECTV is proposed as a much safer alternative. In addition, technologies have been developed to remove or add genes from ECTV. Thus, in addition to using wild type ECTV, patients may be administered ECTV engineered to express proteins of a virus for which they are already immune such as influenza A or human cytomegalovirus and already have CD8 T cells against. This would bypass the need to immunize against ECTV. In addition, one might engineer ECTV as an even more potent anti-tumor treatment. For example, one might use ECTV deleted of immune evasion genes to make it more immunogenic, or ECTV carrying pro-apoptosis or pro-necroptosis genes.

[0149] The use of ECTV is not limited to cancer immunotherapy but may also be effective in vaccinations against viral infection.

### Example 4: ECTV Expressing SARS-CoV Spike Protein is a Viable Vaccine Candidate

[0150] The entry of coronaviruses (CoVs) into target cells such as lung and gut epithelial cells (Hoffman et al., 2020, Cell, 181(2):271-280.e8) is mediated by Spike, a trimeric transmembrane viral protein present at the virion's surface. S is composed of S1 and S2 subunits. S1 contains a receptor-binding domain (RBD) whose function is to attach the target cell's virion through a cellular protein hijacked as a receptor. For SARS-CoV-1 and SARS-CoV-2, the cellular receptor is the transmembrane carboxypeptidase angiotensin-converting enzyme 2 (ACE2). S2 is necessary for the fusion of the viral envelope to the target cell membrane. For S2 to mediated fusion, S is first activated by proteolytic cleavage. In the case of SARS-CoV-2, it needs to be cleaved twice. The first cleavage, by the enzyme furin at a multi-basic S1/S2 site, occurs in the infected cell's secretory pathway. The second cleavage occurs on the surface of the target cell after S1 binds to ACE2. This cut is produced at the S2′ site by the Transmembrane serine protease 2 (TMPRSS2) and is critical for increasing the virus's infectivity. In cells that lack TMPRSS2, the second processing can be done in endosomes by cellular cathepsins but results in decreased infectivity (Hoffman et al., 2020, Cell, 181(2):271-280.e8; Bourgonje et al., 2020, J Pathol, 251(3):228-248; Xaio et al., 2020, Viruses, 12(5):491; Yan et al., 2020, Science, 367(6485): 1444-1448; Hoffmann et al., 2020, Molecular Cell, 78(4):779-84.e5; Ho et al., 2020, Antib Ther, 3(2): 109-14). Ideally, a vaccine to SARSCoV-2 should induce antibodies (Abs) capable of controlling not only SARS-CoV-2 but also other SARS-like CoVs that may emerge in the future. To achieve this type of vaccine, Abs must target epitopes that are conserved between similar CoVs such as SARS-CoV-1 and SARS-CoV-2. Most virus-neutralizing Abs isolated to date target conserved and non-conserved areas in the RBD of S1. Some neutralizing Abs that target conserved epitopes in S2 have also been isolated. Therefore, both S1 and S2 are potential targets of protective Abs (FIG. 5, adapted from (Ho et al., 2020, Antib Ther, 3(2): 109-14).

[0151] As an initial step to determine whether ECTV can be exploited as a vector for a COVID19 vaccine, homologous recombination was used to introduce human codon-optimized full-length S or the S1 subunits from SARS-CoV-2 driven by the potent early/late 7.5 promoter into ECTV to generate ECTV-S and ECTV-S1. Recombinant viruses were purified from single plaques. Inserts of the accurate size were amplified by PCR from viral DNA using specific primers. Sanger sequencing showed that the S and S1 DNA sequences in ECTV-S and ECTV-S1 were precise. Confirming proper expression of S and S1, Western Blot analysis of lysates of infected BS-C-1 cells probed with an anti-S1 Ab (Sino Biologicals) showed bands of the approximate expected sizes in ECTV-S (˜180 Kd) and ECTV-S1 (˜78 Kd). These bands were not present in lysates of cells infected with ECTV-WT (FIG. 6). Next, groups of 5 mice were bled and then infected with a single dose in the footpad of 3,000 pfu ECTV-WT, ECTV-S, or ECTV-S1. One month later, the mice were bled again, and Abs to S1, RBD, or S2 in preimmune and immune sera were determined by ELISA (FIG. 7). Results showed that sera from mice inoculated with ECTV-S and ECTV-S1, but not with ECTV-WT, contained high titer Abs to ECTV-S1 and RBD. Surprisingly, ECTV-S induced a more potent response to S1 and RBD than ECTV-S1. Also, only the sera from mice immunized with ECTV-S contained high Ab titers to S2. Together, the data indicate that ECTV isolates have been produced and warrant further testing as COVID19 vaccines.

### SEQUENCES

[0152] SEQ ID NO:1—Sequence of Ectromelia virus Moscow strain (ECTV-MOS). Virology. 2003; 317(1): 165-86), NCBI Reference Sequence: NC_004105.1.
[0153] SEQ ID NO:2—Sequence of ECTV-4036. Based on the ECTV-MOS sequence.
[0154] SEQ ID NO:3: Sequence of ECTV-EGFP. Based on the ECTV-MOS sequence.
[0155] SEQ ID NO:4 pBSSK ECTV7.5 EGFP
[0156] SEQ ID NO:5—pBSSK-ECTV036Rev

[0157] The disclosures of each and every patent, patent application, and publication cited herein are hereby incorporated herein by reference in their entirety. While this invention has been disclosed with reference to specific embodiments, it is apparent that other embodiments and variations of this invention may be devised by others skilled in the art without departing from the true spirit and scope of the invention. The appended claims are intended to be construed to include all such embodiments and equivalent variations.

The application's sequence listing, which the Patent Office published only in electronic form, follows.

SEQUENCE LISTING (5 sequences)

SEQ ID NO: 1 - DNA, 209771 bp, Ectromelia virus
cacgactgtaggaaactctgagggtaagaaaaatcaatcgctttatagagactatcagaaagaggtttaatatttttgtgagaccatcgaaggagaaaggataaaacttttttacgactccgtcagaaagaggtttaatattttcttagtacaaaagtcaatgttttaaaatatatggatgagagaatatttgtctgtataaaaactgtgtgaaattttgtaccaaagaaaaaaacgtgagccgtatcccctacatggattttactagatcatttatatgccaaaaaatattatactatatacgtttattatatgatgttaacgtgtaaattataaacattattttatgatgcaattgtctggcaacctagatgggcacaggggatgtttgataagctctatgagtatatgttgttggacgttattgtttaagaaatagttgatgcatcagaatgaggttttaatatttttatgagaccatcgaagagagaaagagataaaacttttttacgactccatcagaaagagaataaaaatatttttgtaaaacttttttatgagaccatcgaagagagaaagagataaaacttttttacgactccatcagaaagagaataaaaatatttttgtaaaacttttttatgagaccatcgaagagagaaagagataaaacttttttacgactccatcagaaagagaataaaaatatttttgtaaaacttttttatgagaccatcgaagagagaaagagataaaacttttttacgactccatcagaaagagaataaaaatatttttgtaaaacttttttatgagaccatcgaagagagaaagagataaaacttttttacgactccatcagaaagagaataaaaatatttttgtaaaacttttttatgagaccatcgaagagagaaagagataaaacttttttacgactccatcagaaagagaataaaaatatttttgtaaaacttttttatgagaccatcgaagagagaaagagataaaacttttttacgactccatcagaaagagaataaaaatatttttgtaaaacttttttatgagaccatcgaagagagaaagagataaaacttttttacgactccatcagaaagagaataaaaatatttttgtaaaacttttttatgagaccatcgaagagagaaagaaataaaacttttttacgactccatcagaaagagaataaaaatatttttgtaaaacttttttatgagaccatcgaagagagaaagagataaaacttttttacgactccatcagaaagagaataaaaatatttttgtaaaacttttttatgagaccatcgaagagagaaagagaataaaaatatttttgtgataccctgaaaggaaataggaaaagtgctcataatcgtatcacacttgagacagaaaaagaagaagtaacgagaggtaactttttgtgaatgtagttaagaacatttttgttttgcaaaccggagtagtgtccggtacacttttttaattcgtggtgtgcctgaatcgttcgattaaccccactcatccaatttcagatgaatagagttatcgattcagacacacgctttgagttttgttgaatcgatgagtgaagtatcatcggttgcaccttcagataccgatccgtcgatatacttgaatccatccttgacttcaagttcagatgcttccttgcacatgtctccgatacgaacgctaaactctagatccttgacacattttatatcgacgatcgttgaaccgatgatatcttcgtacctcactttcttatgagagatgttagacccgagtactggatgggtcttgatgttgctgtctttctcttcttcactacatttgatattgatagacaccgcacagtcgttgatcatagcaagagcttcttcatgagtgatggctggagattcaatgccgtacattggagagacgctagacaaccgagcattcactgtgtttccatcagcggattctgagatggatttaatctgaggacatttggtgaatccaaagttcattctcagacctccaccgacgacagtgtaataagtggtgggatctccttttacgacttcttcggataccccatcgtcttcagactctgtaacttcggttactgattgacaaatcttatcattagtcggtgtttggtcttgcttggtgactttgataataacatcgattcccatatgatggttgttttcttcttccgtacacgaggatgcgaatgattgctgaagactggtagggatagcagctgccgccaggcatatgcatgccaggacgatatattgtttcatgattgctgttctagatgattctatttccttaccatacaataaattagaatatattttctacttttacgagaaattaattattgtatttattatttatgggtaaaaaacttactataaaaagtgggtgggacggcgtctgtattcgttgtctttacactttccattggatggagcatgcggtgctatatcttttccgtttattatacatgagagaacaatatatacgagtataatacggacttcatgatttaataatgtagtaattatcgtcttgttcctgtttcctacttctcaaatcatatagatatttttaaatattttctttctattatgaataatatttgtaatggttctttccgtacaacatactgtttagatgatagtcgcttagcttggttatgatattgcgcataatttccggaggcaaatacgatagtctagattgaccatcgatgatagactctaatttattgagtgctttgtctacgagtttacttttacgctccatcgatagatggcactgttctatgagatcgtcgtacatgggaaatgagatatgtttgtccgaatgtatgacttcaagatagctgtgataccgtatgtcttctgttcttaataccgtatacaggtcggtgtcggagattcgaatctctttgaggcgacctatgtcacgactacatttttcgatgatggaatctatcttatcgaatgatatatttttcataaatacacttttatagtccttgtttaaacaggatttactatgtagttccgcgaatgattcgtcccttaataggcagtaggctattatcttctttacgtagtaatcgtcgtaaggagagaactcggacatcctgtagaacaacgatttgatcataggtagagatactttcagtctgtggtggatgatgtcgtgaatatccgcattgtataagatgtttctgttttcaaacaccaagtcgaatactgtcttaccgtctttagtcggaaggttgatgtcgtatccgatgtatacgaggtatgaggcaacattgttgttacaattctggaaggcggtatgaagaggagtcatggtattatagtattcgtctttctgaatgtcgaacctatctagtagataccgtaatatattgagagcgtgacttccgtatccttgattatgttttatgaatagataaagtagatgatgtccttcttccttttgtaatttcccgtatttttgttcgtgccaattgagtaacattatgagaatatgacctgttgcacaatcgttctttatgtattccatgatgggtgtacaatcaagattattacgtatcctcgtatcggctcctcgagataaaagagtatacaccacacgagggctatgtttggtatactgttgaaggtaagtgtgtaacggcgtatttccgattttcgtaaccgcgttaatgtttgctccatgatctattatcgcgtagatgaatcgcttctcagctcgcatcttagtgtaactctttgacttgtaataattgctttcgtggaacgcggatatgtgtttacagtagtaatgaagagaagtgagtccatcctcgtcgacgcaattagggtcagatcctttagtcaataatttgtacagaacgtagtagtttaagctcccattgaatttatatctaagataacacagcaatagatcggatgatttactaaagtcatcaatgtggtccgttagtatatcaaagatcttgttatcgattgatagtgaatgaatcagatagtggtgtagaggaatatgtcctttttcatccttgctatcaaagttacacatgccgtggtgtaacaatatctttaatacagatggcttaaatcgtgtattcatcgtatagcaatgtaatggagagttaccacattttagtcgtttattcagatcgcagtgtttaataactaacttaaacagatgagacgatgtatcaacatcaaagaatgtgaaatacatatgacagacattgttgacagaaatgtgaccttcattctcaccgtcgtctataaatacgttaggtatgtaccacatactgtcgcgaacgatgcgtacaatctcgtccatctcgcccatctcataatgatttactttttcataattagaaatgtacgaaagaaaaagaaaaacagatcaatatatttttagtaattttatgcgagccatataaaataaactccgtgtttatgatgccggtaaatgtttttatcatcttggacggaatcgattttgtaatatgtcatggaaacaaatgaaacaggacattcactccatgataaattccgcaagagagcaacagtcgaacaatcttaatgtctgtatcgcatttattggagacgtaacaatgtagcgcattgtttcctcgtctatctatatgttttgataagttgcgatacgtttcaatctctggttttattttttgtacgttatatcttcatccagtagacgacacagaatacatgcacaatctttaccgcaggccatagctattctggtgttaattattcctatattatatttcacgaaaaatgatgcgagaaaaggaaggaataacatataggatgataaaaagtgagggaggggatgagggagagatggataatccaacttattttgtctatccagtgagtatatattatctcgtccttggtttacatggatcagagtgagatacaatatctgaatacgtacacttccgacatttcttacaaatggtgttacccatttcatcttcccctttctttccatatccacgaccacattttgttttaggagcacatgtaacacagttaccatcagaagcttcaaggagacaataactattcgagacacaatgacagattctatttgtggtaggtgtacaagatgtgacctctacaactatgacaccaaggagaacgattatatattgacgtgaatgcgtcactcggacaatgcccacaaatggtatcgctgtatttatcacatcgatgatctgaatatgttcctggcttacatagtttacaacactttaattcttgttcacatttcatagacaatgaatttgtattaataatcaagaatcctaagatgatgataactttcgtcatcgttaagtcaataatgattaatttatttattatatgttaatgtcataaaaactaattgtttgttagacgatttaatctcaatctctttcacaatcatttggtggaatatgatcaacatttagtatataactagtatgatacgcgacgacgtccatgtcggaatatatcgcgtccgtattggcatatactatatagacatcgagattagagagacagtctcctaccacagttaccgtttctgaatgaggcataaagtataccttcgtcgtgggtgttagttgtctagattctcttccagaattacatttgatttctagattaatcttgcactgcgttgtgaggtcttgatgtactttatcgtttgtaaagaaacctgaagttgctagtttatcaacgactgaatagtaatctccaataaagacaggagtacaatcctcatgtgttagagtaattgttaactcggaagttgatatggtactgctgcttcctatactcgaattacaagaggtcttgttaacaggatacatattaatttctacatctatgctgttaaaggacagatcacatttatctatattacccggacactttttacatattacatctcctttagatgagtagccatatacaccgtaaccagaaccacactttgtttgtggtacacatagcctgcaaccgtttgatccttcaaattcgcagtagtatccggatgcacagacacatactctgtcctgtgtgttactacacgatttagtctctacttgattactgctacatttgcctcgacaacttagacacgcgggactatgattaggaatggatgtaaaggtgtcatctgggcacttgtcacattttgtattagaagtggtattacaggaatgagtcatatacattccaggattgcattgtttacaacatagattattactgttatagtctgtaccgttacatttcccattaatgggtgtatacggaacatctccacttacgactacgaacatatataccaacaagatatatgatggtgtcatcttcatcattaatatctagttaaatttataataatgttttagatggttacgaccatacaaaatagtatttaaatcgtattcgcttaacttggatattatctcgcgtatgatttctggaggcaatagtgagagtttgttattatcaacagacgatgatatactatatattttgtcaatgacagtatttatgagtttatatttacgttttatgtgtacgttacaattctctataatgtccatgtacatgggaaaagtcttgtttgtaacatggatatcattaactagattgtatattttatattttatatcttcatatcttaatatattataatagttttcttgtttgagcctatttatatcattgacgcaatctgaacgatattatctatataatcgaatgttattaaatcaataaatagttcttcgtacgtatgatttaaacattgattattgtattcttttatgaaattgttgttcattaagatgcaataagttattatatatcttacatagtaatcatttggaaaatacggaataatactaattattttttgattacggataacgttatatctagtccgtgttttataagatgatagataatacaatctatatatagcttattatctgtttgtgctaatataatatcaaatatactcttgttatcgttagttgggagattaatattacatccaatatatacgagataagacattatatcaacgttgcacgctataagcattatgtagaggtataacgtcattaaagtattcatcgtttttatgtcaaacttctttagtaaataggatagtatattaaggtcattactatcattatccttatgaatagatagatataaggagatgccgaccttctttcttttctagttttctgtatttgactcgtaccaattaattaacattaaaagagtattgtattctatatcttcacattttatatattccattatgggagttagacgaacattgtttttgtattgtcaagtcagctcccaatgataaaagagtaaatattatacgaggactgtgatcatattgtgatatgtagaagtgtagaggtgtatttcctctattatttactttattaatatcagctccatattttaccaactctttaataaatttcttttcacgatgcatcttattgaatggcatcttattataagtggacatatagacgcagaagtaatgaagaaaagtattacctctatcatctgcataattagtgtctgctccttttctcaacaacttatatagcacgtagtagtttatcagaaagcatatcaaagatatcattctcaactttatcatgagttagatatttgtgtaacggaatgtgtccatcactaatcacgaacattaaacgtattcatgccatactcctttactaggttttttaaaacagatgattcaaatctttcattcattagataacagtgtaatagagttgtcccagattctagtagtttgtttatatcacagcattctataaacagtgtctaaataatagagaagatggacagacttcgaagtattcaaagtataaataacacatgttatctatattcgttgatgaattattattaaacatagttatgataaatgattctgatgacatctcgctagttataaaatctatcgtatcattaaacatcgttgcatcataatcgcgtagcatagtttttcataattaatacaatatttagaagacttattcggaaagtattctaataacatttatcattgattatataatgaatagagatccacatgagcatggatgatatggtaatgtaactatcgatactcatttttaataatacttgtgaatatatcattctgtgatgcaagcatgtaaacgtaaatatcattttaaaaaaatcatcaatattctcaactagtaatgaactgaacttccagtaccaaactggttctaaaagcgttaaactattttattagtaccgattatccataatttccatagatactgtttcaagactattatgatgctcagatttaatgctcctattgtcgtaatccttcatcattttatatttcctggttctatatttattgcgcgctatataaattgccaatatcaaaataatgactaacagtagcagaatagcgccacatatgatatataatatattgtagatatctgacgaactgtttagataattatcttcttcttttattataataacacttacgtttttatcgaattccttaaacatgtcattcaatgcttctgctacagcacttgctactatctcatcttctatagcatctttggcatcttttgtatccaaggagattatagtcatttcataacatgataaaacaactacacctgatgattcaagatagtcatagctcatataagtgtcgtttactaacacataagatttgttagtctctacagaggtgtatatataatcatctaaagtaccacatagataattatcaataggatagtacttttcaacacgattgttcttaacatctattatacaacatctcttaccttcttcggattctataatgtcttttatatctttgtctgatagagtgtgtataaataaatctctggtgatatcatttattttgttctgtatctcagccatcttttccttatctgcttgatatgcaatatctaacagattaccatctatattaacacttgctatttctctaccctctgaagtcaatgcctttgctaatctgtttatagacgccggcaatgatccgtcgctatattccataatcttcttgtattcattgtacagatcatttaatttgttactaatttctttatccacatattcgttagaattgtcatgagtgaattcgaatgtgtaaggaggttgctgtaacacgttagattctatccatatgtctctatattctatatgaatatatgacttacatggaaaatgacctatatgttgatacttgataattagtataattactatgtattatattcattattatgaggaggatttatgtcatatcatgaaattaataagagaactagattaaagtaataggaattggaattggaattactctttatttgtcgcactattataaaaagatgttatatctcaatcactgctataaagatccatcatatctatgataccgtatcagttcctatcaatctctgttttgggtgaattcaaaaaaattaataatacctagaaaatattccacgagcattccttttatcgatatagcatttggatagcctgtcaatatcgacatcattgaacaacggattcatcttacacttttcacgaacatcctgagatacattgttccatcttataacccgaattagatccttgtcttcggggaactcagttaaccaatcaagaataatatcgatgaccgcatcttcgttgacatctagatagtcgcagttcatgatattaaacatggaatcagttgaaattaattctttgaatctagtatccttccacaatgtttcaatatcattagcaattttttcctcgatcacagtcatgacatcgtatatatcttccatttccttaaatctattgctaaacaactcatacatctcaagagagtttctttcatctattatataatgaaagatacgaactgttgcatgtcccaagatctcagaatcaaggaagcgagcaagatcaaacatttcaactacatcttccaactcaagatcacccatgactcctgtgtatatgaaatcaatggccgtctcgataacaaaacctgaataatcaatattgaatattttttgatctggatcattacttagcatctcagcaaagtatgtagaaaatccagatacaaccaccttatgtgcgctaatgtcgttgttatcttttgtgtggaatgttatatcacaaaactttccagattttctaagatcattcatattgttagctagatcatatctatgtttcacacacaattctttctcatgttcgttaaggtcgtacccgcgaacaaaatagtaatcactcattctgacgacagcataaatagaaatagtttttctattttttatagagagtatctccctattacctcattatatgataatgtgttagatatttgaacttaacaatatcgtttataaaaaatcattcatgtgtctgtgtttggacgcttgtcatagactgtagtgagtagtcaatatcacatcctatgtaatcaatagcagtgttagtcgcataatatttcgtatacaagtcacgtatttctggtaggttcatgttggaaaatatctccataactaattcttttgggatggtattcaagtaagttggttgatcatggtctatgtagtagatgactttcctcataagattgcatttctctctaataccactaataacatctttcacgatatcgtgatatatgtttgattcggtaattaattctttatcatagttgccatacactggaatttttatattattatttaacaatatgttgtatatagttattccatacgttatatagatagattttaacgacatggcatcactattatagcgatacgcgttgtgtaaaacatttatatatttttctctgcttacatcatcgagaggatagttatcttcagcattataatatatattgttaatataactacattcgtagtcttcttcatcatcttcttcggtttcacgtactaaaatatcatccctctgttgtatcttaaattctatagcctccttgaacttggaatagaacgacggaaccattaatattagataactaatgacagttggactacattcccatacatctcttactttattcatgagaacacaatcaataatatggtccgtcaatggacctaagatttctttaggaggtaattgactaatgagaaaactagtccacttacgagcactatatacacgtaatgccaaatagaaaatagttttattattataagttcgtaacgtcatatcagctccattatcgagtaagtattttgcaatacgtatggtgttgtactttatggcataatgtaacggcgtataaccgtcataatatttattaatatcaaacccgtctagagatctaataatatctagacactctgtatctatatatgactttttaatgtagtcgtgtatgacagaatctctgaataattccggtttagcatgtttactaagtattaaaagtttacgtagtatctttatattttgtatattatcgatattattaatattatggatagccgtaatgacaggaattctgttacatgcattaggcataattatatctgctcctagttctataaatgtatctatgattgtttcattgtaaaaattgcttcttgtaaaaccatgtaagtaataatgtaacggtgttcccaacggagtattttcattcatggcgtttatatcgtttccattatacaccaataacttcatgtaattaggtgttattaaactttttaaaccagccaatacatgaagaggagtaccgtaaaagatacgcgttaatccattaaagtctccacaataataagttttaagacaatgtttgttagtcagaactaacttcttaaagaatggatagtcaaattttttatgatttaatagataaacatgaactaaagacgatctctggttcatagtaagataatcgtttagtatatcaatcatttctaaattcattatgtcccgtttaaaatatgcagatacggctgtattcagataataatccttgactgttaagtcatatccgttagcgaggaaatcttttacaatgttcatatctaaatcattttttctgatttcgtcagaatatcccaagatagaactattttttttatatctatcatcgacgacattagtttcttcccatgtttgagtagatgcgtctttagtagacagttctttatattctacatttggttcattacatattgtattgtagaaagataggtaatcgtcatattcgtttttatttgtagcgtttattgtgttgttttctggattctcaaagtattgagattcatgagacttcttgctagcaatataaaagtatttatgtaatgaatatctttccatctctacaaagtataatatatttgataaaaattcaataatctaccattggaacttcacatatccatcttctatctgcgtatattctagcagcactaattccgttgtcgttgagataagcatagtcttcaacacatctaatatgtataatattattatatggtttattatcacaattcaaccatggcgattgtgaattagtcctatatagcccaataatcaaatatacccttgtatctgtatatcttaggaaatgtgtcattaataatacatgctaaacgcccgttcatatttttacaatatttaaacgatgctgtccaattggtgatatattctgaaaagtaataacatatgttgtttataccaatggtgtttttaggacatatcttgtatcttgtttcttctttaaagcatctatgttcgatgaaacatataactaaaaatgaggatagtagagatagagataatataactatcacgacgcggtaaactaattcgcgcatgataaacaacattgttacattatatcatcattaattaatttatttttatttttatttttatttttattggtaatgccaggatgcttaataaaaatgtttaacgaacataatctgctttttaatcaagtcgtgattgttgtaataatctagatttatatctgtattaacgtcaaacaaacttaaatctattttaaagaagctgtacgtatacagtaacgtcttatcagacgtaagtacttgatctcccagatttatattcacgtactcctccattgtgtaaaattaatcatataagtaaataatcataaaatattatatcaattttattatatgaatgatagctatctaattaatagttctagtggcgcaagtatttggaggtataccgctaatatcgatcatgtttcctatatgaatagtagcagtatcctcttcaaatccctcatcggtattgacgtacacaatatagagatggagatctgatagacagttgcctattaaagtgaaattttcagcgtgggttgatgctgtttcaggaacacgtgtaaaattaccgattaatacaggttccgtttcagcgttacattttacttctacattcagcgtacacatcttggatgtattttgtttttttgtagtatctgtgaaaagtccggctacagcagttttatcctttatagaataatattctgttacaaagactggatcgcagtctgtactattaacagtaattgttaattcagaagtcgtgataatatcggatgattgttttgtacttagtcgattacaagatgatacgttaactggatatagttcaaaatctatagatatgtaattaaatgtatctgtaatgtatttgttttcgaagaaaccgggtggaggataatcatttgcaaacgatgcgacaaataatgatgcgaatattagtattgtgtttatgtttatgtttatcatgatgagtatttatgataacaaagttttgtattatccggagtggtacagcactgttcggttggttctattttctttgttgtggtatcaggagtacatcttgcacaactattgacggcaggcagcatacatttcaatcctggaccacattgacattttcgtggtttatccggaccacatgattgtatctctaccatattgcttaaacaagtaacacacgccttacataaaccatcttcaggttcaagatagtaatcattaggacacgttttaccaaatgatgtatatactaggcaggttacgatagcggataaaaagatagtattcatcttcatgctatttaatacatctaatatatgtattggtcattaaaaaatattattttatagaaactttgtgtatgtatccagaacaattttatcttgttacgcttcatctgtaagtcgagcattgataaatgcggcatgatgtctgttaaatattatttttttaaaataacttagtctaaatatcccgataatgcaactaaataaaagagtaacgggaatacacataacgggatacatatccatgatgtatcttgatatgtcattggctatataatacatagatcgcgcatctgttatgtacgtattaactatatcatataatggatcattgccatgacaacacgctactagattgtgattttccctatgtgtgattatgtcctctttgtaacatttactaactagtatatcgtatatactgatattagttctcgaattaatgtgtaacttggtcaatttatcgatgttatctctgatgctaactaacttatcaagcgccaaaaacattgcatgactattatcgagaatcgctatatccctctccatatactcgatgcatttattacagtaatccaatccagctaacataagagccaatctcaatgttggtttaatgatatcatcttcacttaataataacgatggaaactttccagtagcgtaacacttatctaagaagtatataactatgtctacattaggtctcttatcgagaatattcttaacaatataccattggtgacctgacaacgtattatttcccatggttaacattagagggtatacaccattttttgtcggtatattaatattggtttggatggataataagtacacacatgaatccatgacaatattggcattagtatgcgagataatagatacatgtaatggtgtcataccagacgtttcgcatactgcgttattatatctttctataatcgcacaatgatatacgtcatgtatatttgtactatcgtacggctcatattcatcagtatataagtcagtaggtatattatatttagcaataatatggtgaagaatgcatggagtatcgtctactctaattaatagatcttgaagtatacgattctttaccatattcaatactttatcagatatcaggcaatctattatgtcataatacatataattttgagcggtgcatatatatgaagttaatggagtataccctaaacaattgactgctgttatatccgcacccaaggatatcagacactgaataacatctagtcttatatcgttatcggtttctggatctaagatattaacaacagacaacatagagagatatgtgtgtagtaccgtattaccaatattgtcgggttcatttatatcattcccgtactcgtgtaaaagtttaatgatgctagtacttatgttgtgtcgcagaatatattgatgaagacaagtccttccagcactatctttataatgtagttttactcctggttgtaaaaaggagtacatgacagatatatcgatattccgagctagtgttatatacgaatgtagcatcataggtatattttttactttattgccatctagtgattctacgtacaagtttgttatttctggattaatattatctatattggctatgtatgtcataatcggactcattccattaacgcatttcatatccatgtctccaccgagttcgataatctttttaattacgtacgcacaaacatttcctgttatcgtgtacgtgtgcaacggagtaataagatcacgattctgcaaatttacatttactccgttattgcataaccactctaatatatctatatcaacatccatgttgccgagatacgcgtgtaggataccgtatcctgttttcttacatacataattaagatttacaattcctacatctaccatatatttaatcaagtctagttctatacttcggattttcggtgagttgaaatatgtatataaaatatccatatctccattgttgggaatatcaaacacatgattggcggttttacttttattatctttaatacatttgatgaaatttttatactgatcaaccaacgatttgttttttctgtctgtttttaatatcaaaatcatattactgataatattaatcaatgcggttttactatcggtatactgttcacgatatctattatcgataccataatatttctttttaaaaacttttatgcgtttggttataactgtgtgattataactgtatatatccccatcgctacagtatccatcatctggatcatcattatttatacgagcattggtgcttgtacggttatcaaaatcttcaaagtacatcgaatatatcagttttctgacattaactatagcgtgttcggtcaatgatgccattttgataactataatcaaaatctgtcagtgttggtagtacataaaaagtttatattattgttacatttttaaaaaagatcaatgcataaaaaaattagaagtgttagattatattaattatactataaaaattagaagtgttagactttaactatcttataacttataacttataacttataacttataacttataacttataacttataaaactattgactattaactatcttataactaacttataactaacttataactaatttataactattgactattaactatctttaacttataacgattgactattaactatcttataacttataactatcttataactatcttataactcttataactcttataacttataactattaactaacttataacatattaactcatttcaagaagggtggtgagagaactctatgataacttgtgaaacaattagatccctaatttctaatggtagttttgataggagattgtcatcagttgatacattgtttattatctcatctattagagcacgtctgtttagagctttagtgccatgctcgtttacttctgtgtaaatcttaaatcctttagtgatacactgtttcaaaactggatgtttagaatacctatgaagaatgtgggaagcatgcttcaacacattcaatattgtattgtattgttattgttattgttattgttattgttattgttattgttattgttatattatttacacaatagacaatgtattgtttatatactgaattaataatacaaaaattccaatcttgttattaaacgcacgccgagaaaaatagtataaacataaaataaaatccatcaaaatgtcgtttaaatatctgatgttgttcgctgctatgataatcggatcattcgccgataacgttaccgtcgaaacggcatcgccagaaattgcaaacactacaacagatattccagatgttatcgtattatgcggtccagagggagatggctattgtttacacggtgtctgtatccacgctagagatatcgatggtatgtattgtagatgcgatcatggttacacaggcattagatgtcagcatatagtatagtagactatcaacgttcagaaaaaccagacactacaacatcatatatcccatctcccggtattgtgcttgtattaataggcattattatgtgttgtctattatctgtttataggttcactcgaagaactaaactacctctacaagatatggttgttccataatttttataaaattttttatgagtatttttacaaaaatgcataaagtgtatgtcgtatgtatatttataaaaatgctatgctatgcaatgtatctgtattatttgtatttatctaaacaacactctacctctagatatgatacaaaaatttttttatttcagcatattaaagtaaaatctagtcaccttgaaattgaatacagtgggtggttccgtatcaccagtaagaacataatagtcgaatacagtatcagattgagattttgcatacaatactagtctagaaagaaatttgtaatcatcttctgtaacgggagtccatatgtctgtatcatcgtctagtttatcagtgtcccatgctatattcctgttatcatcattagttaatgaaaataactctcgtgcttcagaaaagtcaaatattgtatccatgcatacatcgccaaaactatcacttatacgtttatctttaacgatacctatacctagatggttatttactaacagacattttccagatctattgactataactcctatagtttccacatcaaccaagtaatgatcatctattgttatataacaataacataactcttttccatttttatcagtatgtatatctatatcaacgtcgtcgttgtagtgaatagtagtcattgatctattatatgaaacggatatatctagaacggcaattgtcttacgtccagttaacactttctttgatttaaagtctagagtctttgcaaacataatatccttatccgacgttatatttcctgtagggtggtataattttattttgcctccacatatcggagtttccaaatatattactagacaatattccatatagttattagttaagggtgcccaattagaccacgtacgcttattatcatcatttggatcgtatttcataaaagttattgtgttatcgatgtcaacacattctacattttttaatcgtctatatagtatttttctgatattttctataatatcagaattgtcttccataggaagttgtatactatcgaaatcagttacatgtttaaataattctctgatgtcattccttatacaatcaaattcattattaaacagtttaatagtctgtagacctttatcgtcgtaaatatccattgtcttattagttacgcttatttttatgtgtttttacgttgctttattatatttttataagaatgattgtttgactaataacgagaactattaagacacattattaggtatatatttataaaaaagtttttgattacgatgtcatacgcggaaagaggacacattaacatcatacatcaattaattacattcttataacatcgtaatcaaaagaattgcaattttgatgtataccaactgtcaatggattatggaattgtatattacacattataaggtatgatgtaacgacaattaccgatcggtatttgtctgccagtgtaatagaattatatattctattacaccggccttgtatacataataataagttgtggtagtatgatctccatatttataatttaggactttgtattcagtatttttggaatcataaaaaaataaaaaaagttttactaatttaaaatttaaaaagtatttacatttttttcactgtttagtcgcggatatggaattcgatcctgccaaaatcaatacatcatctatagatcatgtaacaatattacaatacatagatgaaccaaatgatataagactaccagtatgcattatccgaaatattaataacattacatatttcatcaatatcacaaaaataaatccagatctggctaatcaatttcgggcttggaaaaaacgtatcgccggaagggactatatgactaacttatctagagatacaggaatacaacaatcaaaacttactgaaactatacgtaactgtcaaaaaaatagaaacatatatggtctatatatacactacaatttagttattaatgtggttattgattggataaccgatgtgattgttcaatcaatattaagagggttggtaaattggtacatagctaataatacctataatccaaatacacccaatagtacaaccatttctgagttggatatcatcaaaatactggataaatacgaggacgtgtatagagtaagtaaagaaaaagaatgtggaatttgctatgaagttgtttactcaaaacgattagaaaacgatagatactttggtttattggattcgtgtaatcatatattttgcataacatgtatcaatatatggcatagaacacgaagagaaaccggtgcgtctgataattgtcctatatgccgtacccgttttagaaacataacaatgagcaagttctataagctagttaactaataaataaaaagtttaattatcgacgatgtatgtcgttatttttctcatatgaaagattaatttgattctaatataatcttcagtattggatgaatctcaattcaaattaattccattagattatatcataaataaaaatagtatcatgtgctacttcagccaaatattctttttttgaaacgccatctagcgtagtgaggacacaagtgaacctataatgagcaaatttattagtatcggttacatgaaggactttacgtagagtggttgttccaccatctgtggtacgaacggtttcatcttcgttgatgccatcgcccagatgttctataaacttggtatcctcgtccgatttcatatcctttgccaaccaatacatatagctaaactcaggcatatgttccacacatcctgaacaatgaaattctccagaagatgttacaatgtctagatttggacatttggtttcaaccgcgttaacatatgagtgaacacacccatacatgaaagcgatgagaaataggattctcatcttgccaaaatatcactagaaaaaatttatttatcaattttaaaggcataaaaaatacttattgttgctcgaatattttgtatttgatggtatacggaagattagaaatgtaggtattatcatcaactgattctatgatggttttatgaattttattatgcttcactattgcatcggaaataatatcatatgcttccacgtatattttattttgttttgactcataatactcacgtaattctggattattggcatatcgataaataattttagctccatgctcagtaaatattaatgagaacatagtgttgcctcctaccattattttttcatctcattcaattcttgattgcagagatctatataatcattatagcgttgacttatggactctggaatcttagacgatgtacagtcatctataatcatggcataatacattgttttatagcataggcattatctacgatattagatatttcactcaatgaatcaatcacacaatctaatgtaggtttgacataatagcattttcagcagttcaatgtttctagattcgttgatggcaatggctatacatgtatatccgttatttgatctaatgttgacatctgaaccggattctagcagtaaagatactgattgtttattatatctaacagccttgtgaagaagtgtttctcctcgtttgtcaatcatgttaatgtctttaagataaggtaggcaaatgtttatagtactaagaattggtcaatcatacgacctgtcgcgaagaccctttctgtatgcattagtgtagaaattataacatccatagttggatttacataagtgtccaatcgggatctctccatcattgagaggattgacagcatctccccttccttttttagtagatatttcatcgtgtaagaatcaatattaacatttctaaagtatccgtgtatagcctctttatttacaacagctccatattccaacatgcattccaatagagagatatcgatatcgctgaatgttatatactcaattagtatatgttggaggacatccgttcattgttttcaatatcaaagagatggtttccttatcctttctccatagtggtacaatacctacacattattccgtgcggctttccattttccaaaaacaatttgaccaaatctaaatctacatctttattgtatctataatcactatttagataatcggccatgattcctcgagtgcagcatgttagatcgtctatatatatatgcataagcagtgttatctattcctttcattaacagtttaacgatgtctatatctatatgagatgacttaatataatattgaagagctgtacaatagtttttatctctagaagatgggttgattccatgattaatcagacatttaacaacttccgggcacacatgatctcgaatccgactctgaatagagcattattcttgaattggttcctggtatcattaggatccctgtctttcaacatctgtttaagtttatcgagaaccacctcctcattttccagatagtcaaacattttgactgaatagaagtgaatgagctactatgaactctatacacccacacaactaatgtcattaaatatcatttttgaatgtatttataccaggtcaaaaaacttgtacaattattaataaaaataatttagtgtttaaattttaccagttccagattttacacctccgttaactccactttttacaccactggacgatcctcctccccacattccaccaccagatgtataagttttagatcctttattactaccatcatgtccatggataaagacactccacatgccgccactactaccccctttagaagacatattaataagacttgagttaagacaagtttaacaataaattaatcacgagcaccctactaccaacctacactattcatgattatagtttctattttttacagtatattgactaaagtctctagtcacaagagcaatactaccaacctacactattatatgattatagtttctatttttataggaacgcgtgcgagaaaatcaaatgtctaagttctaaattctaacggtagtgttgataaacgattgttatccgcggatacctcatctatcagttgtctattttcttactttgttttattaacttattagtattatatattatttgattataaaacttatattgcttgttagtccaatctgtaaatatcgtttctttgtatgtttatttaacttgtacatcactgtaagcatgtccatgccatttattttaacttgacgcatatccgcaatttctttttcgcagtcggttatatattctatataagatagatacgtatcacatgtgtacttatagtcgactaatatgaagtatttaatacaagtttctagtatacgtttgttacgaatgttcgcggagtatagcctattattttctaaataacaaactgttttctttatatattcgatggttggtaatttactcagaataatttccaatatcttaatatataattctgctatttctgggatatatttatctgccatcataacacaaatactaatacatgtagacccatatgttgttatattaatatctgcgccattatctattaaccattctactagggcaacactatgcgactcgatacaataataaagtatgctacgtccatgtttatctattttgtttatatcatcgatatacggcttacaaagttttagtattgataatacatctaacgcacgaatcgagaaggtagggaataatggcataatatttattatgttatcattatcattacgatatgtcagaagataatgaatatctgtacgcttcttcttgtactgtaacttctggttttgttagatggttgcatcgtgctttaacgtcaatggtacaaattttatcctcgctttgtgtatcatattcgtctctagtataaaattctatattcagattatcatgagatgtgtatacgctaacggtatcaataaacggatcacgccatttagtcataacagtaatccaaaattttttaaagtatattttaacgaaagaagttgtatcatcgttaggatttggaaaatcttgtctacagtgtatggcacgagatcctcataagtgtatatgtctaaagtgatgtttaatttatcaaatggttgataatatggatcgacagaacgacaatttccgaagacggaaataagatatagacatgcaataaatctaatagcggacatggctacctccttaaaaaatacgaactctttggctatttagtaattggcacttaacaatgctccattaatccatggactcataatctctatatggaattagtggatgttctatatacggggatgagtagttctcttctttaactttataatctttattaatcatatttagtctgatgtatgggtaatagtgtttgaagagctcgttctcatcatcagaataaatcaatatctctgtttttttgttatagagatgtatcacggcctcatatattacgtaatagaacgtgtcatctaccttattaactttcacggcatagttatttgagaatactgtcaatcctttgacctcgttgatttccgaccaatctgggcgtataatgaatctgaactttaatttcttgtaatcattcgaaataatttttagtttacatccgtagttatctcctctacgtaactgtaaatttctcaatgcgatatctccattaatgacgatgtcgaattcgtgttgtatacccatactggatggatgaacgaataccaacggcaccaatagtaatttactttttcatctttacatacttggtactagttttactatcataagtttataaattccacaagctactatggaatacgccaaccatcttattatagcacgcatgtcttaaagtttattaattatatgttattttatatatcgctacgaatttaaacagagaaatccgttaggaagaaaaaaattatctatctacatcgtcgtctattagataatgtctctgtattctacgatagagtgctactttaagatgcaacagatccatgtcatcgaatatatactccattaaaatgattattccggcagcgaacttgatattggatatatcacgacctttgttaatatcaacgacaatagacaatagtcccatggttccataaacagtgagtttatctttctttgaagcgatattttgtagagatcttataaaactgtcgaatgacatcgcatttatttctttagctaattcatatatgtcgccatcgcaatatctaacagcatctatcttaaacgtttccattgctttaaagacgtttccgatagatggtctcgtttcatcagtcatactgagccaacaaatgtaatcgtgtataacatctttgatagaatcagactctaaagaaaacgaatcggctttattatacgcattcatgataaacttaaacaatgaaaaatgtttttcgttgtttaagtttattgagtagtatatcttaataattgttattatttcactaatttaatatgtagtaatgagtacctctataaaaactatatacgaatgacataactatcatactagtatcaaagaatgtctaggacgcttaattttcatatgattagattcccctgtatgtgttgtctgtattctgaagctattttctctatcgcattagtgagttcagagtatgtataaagttaaatcgaataacgaacataactttagtaaagtagtgtctataactcttttattttttagccatcataataccatgtttaagatagtattctctagttactacgatctcattgttgtctagaatatcacatacactgaatctacatccaatttctaaaattggtctgtgttaaatcccttctatattattattgatgtattgttgtagaaaactattacttagaccattttctttataaaacgaatatatagtaatccaattatctttaccgatatatttgcacacataatccattctctcaatcactacatctttaagattttggttgttaagatatttggctaaactatataattctattagatcatcaacagaatcagtatatatttttctagatccaaagatgaactctttggcgtcctctataatattatcagaaaagatattttcgtgttttagtttatcaagatctaacctgttcatatccatgattaacgacgttacaataaccgcgtaaaataaaaatccattttcattttttaacacaatactattcataattgagattgatgtaatactttgttactttgaacgtaaagacagtacatggatccgtatctccgacaagcacgtagtaatcaaattttgtgttgttaaattttgcaatattcatcaatttagatagaaacttatactcttcatctgttttaggaatccatgtattaccactttccaacttatcattatcccaggctatatttttgtccatcatcattgcgcagagtgaataattcttctgtatccgacagttcaaatatatgatccatgcatagatcggcaaagctattgtagatgtgatttttcctaaatctagtataacactcgtttactatgaaacactttcctgatttatcgaccaagacacacatggtttctaaatctatcaagtggtggggatccatagttatgacacagtaacatagattattaccttcttgacggtcgcaaatatctatatacttattgttatcgtatcggattctacatatagatggcgtgtatatcaaagatatagaacacataaccaataaaccattgtataatttttatgttttatgtttattcgcgtacacattttggaagtttcggctgccatgtattttccggagagcaagtagatgatgaggaaccagatagtttatatccgtacttgcacttaaagtctacattgtcgttgtatgagtatgatcttttaaacccgctagacaagtatccgtttgatattgtaggatgtggacatttaacaatctgacacgtgggtggatcggaccattctcctcctgaacacaggacaccagagttaccaaccaatgaatatccactattgcaactatacgttacaacgcttccttcggtataaaaatcctcgtatccgttatgtcttccgttggatatagatggaggggattggcatttaacagattcgcaaatgggtgcctcgggattccataccatagatccagtagatcctagttcacaatacgatttagattctccgatcaactgatatccgctattgcaagagtacgttatactagagccaaagtctgttccaccaatatcaagttgaccattatcgatatctcgaggtgatggacatctccgtttaatacattgattaaagagtgtccatccattgcctgtgcatttaacatatatggatcccattttttgctttctgtatccaggtagacatacatattctatagtgtctcctactttgtaagtatcatcagtccccacattattcttaaatttcatattaatgggacgtgacggaatagtacagcatgatagcacgcatcctattcccaacaatgtcagaaacgtcacgctctccaccttcatatttatttatccgtaaaaatgttatcctatgcattgtccaataataaaagtcatgctattgtaggaattttttttcacagttgctcaaaaacgatggtagtgacttatgagttacattacattttggagtctcatctttagtaaacatatcataatattcgatattacgagttgacgtatctaacaaattccaagtatttgattttggataatattcgtattttgcatctgctataattaagatataatcaccacaagaacacacgaacatctttcctacatggttaaagtacatgtataattctatccatttgtcttcattaactatatatttgtatagataattacgagtctcatgagtaattccagtaattgcatagatgtcaccatcgtactctacagcataaactatactatgatgtctaggcatgggagacttttttatccaacgatttttagtgaaacattccacatcatttaatactacatatttctcatacgtggtataaactccacccattacatatatatcatcgtttacgaataccgatgctcctgaatatctaggagtaattaagtttggaagtcttatccatttcgaagcgccatgtttcaaatattctgctacagccgttgaaatagaaaattctaatcctcctattacatataactttccattgttaacacaagtactaacttctgattttaacgacgacatattagtgaccgttttccattttttcgttttaagatctacccgcgatacggaataaacatgtctattgttaatcatgccgccaataatgtatagacaattatgtaaaacatttgcattatagaattgtctatctgtattaccgactatcgtccaatattctgttctaggagagtaatgggttattgtggatatataatcagagtttttaatgactactatattatgttttataccatttcgtgtcacaggctttgtagatttggatatagttaatcccaacaatgctatagcattgcgcatagcattagtcataaacttgggatgtaaaatgttgatgatatctacatcgtttggatttttatgtatccactttaataatattatagctgtaacatcctcatgatttacgttaacgttttcgtgggataagatagttgttagttcatcctttgataattttccaaattctggatcggatgtcaccgctgtaatattgttgattatttctgacatcgacgcattatatagttttttaattccatatcttttagaaaagttaaacatccttatacaatttgtggaattaatattatgaatcatagtttttacacatagatctactacaggcggaacatcaattattatggcagcaactagtatcatttctacattgtttatggtgatgtttatcttcttccagcgcatatagtctaatagcgattcaaacgcgtgatagtttataccattcaatataatcgcttcatcctttagatggtgatcctgaatgcgtttaaacaaattatacggagacgccgtaataatttccttattcacttgtataatttccccattgatagaaaatatcacgctttccattcttgaagtactatagtaattatagtataatgtaaaggtttatatattcaatatttttataaaaatcatttcgacattaattcctttttaaatttgtctatcatctatagaaacatattctatgaatttataaaatgcttttacgtgtcctatcaaatttctacaaaagaatctgttatatggtatagggagagtataaaacattaaatgcccgtacttattaaagtattcagtagccaatcctaactctttcgaatacttattaattgctcttattctgtacgaatctatttttttgaacaacggacctagttgtatatcttgttctatatatctaaaataatgtctgacaagatccattagtttaatatcctcagtcatcttgtctagaatggcgtatctaactgcgggtttaggctttagtttctgtttctatatctacatctttacccaacaccaaaaatataatagctaatattttattacaatatcacgaactaatgtttctttggttatctagtatagtcacgatcagacaaataaataaaatcagatgatcgatgaataatacatttaaattcatcatctgtaagatttttgagatgtctcattaaaatattattagggtcagtactcattatcatatattggcagcagctattacttattttatttttctgtattttattatttttcaccatatagatcaatcattagatcatcaaaatacttttcaatcatcctaaagagtatggcgaacgaatcttcccatctaatttctgaacgtctaccaatgtctctagccactttggcactaatagcgatcattcgcttaacatcttctacattattaactggttgattcaatctatctagcaatggaccgtcggatagcgtcattctcattttcttaatcaatgtatatacatcgtcatcatctaccaattcatcaaacaacataagctttttaaaatcatcattataataggatggatcgccgtcatttctccaaagaatatatctgataagtagagtcctcatgtttagtaatttaactattttagttaacaactatttttatgttaaatcaattagtacaccgctatgtttaatatttattcatattttagtttttaggattgagaatcaatacaaaaattaatacatcatcaattttggaaatacttagtttctacgtagtcaatgaaacatttgagctcatcgtaaaggacgttctcgtacaggacgtaactataaattggtttatatttgttcaagatagatacaaatccgataacttttttgacgaattctacgggatccactttaaaagtgtcataccgggttctttttattcttttaaacagatcgattgtgtgatgtttattaggtcttttacgaatttgatacagaatagcgtttacgtatccaccatagtgatcaatagccatttgttcgtatgtcataaattctttaattatatgacactgtgtattatttagttcgtccttgttcatcattaggaatctatccaatatggcaattatattagaactgtaactgcgttgtgtgcacatgttgatgtgtctgtttatacaatcaattatactaggatccatgccactaccttcgggtaaaattgtagcatcatataccatttctagtactttaggttcattgttatccattgcagaggacgtcatgatcgaatcctaaaaaatatattatttttatgttattttgttaaaaaataatcatcgaatacttcgtaagatactccttcatgaacataatcagttacgaatcgtttatatgaagtaaagtatctacgatttttacaaaagtcaggatgcataagtacaaagtacgcgataaacggaataataatagatttatctagtttatctttttctatcgctttcatagttagatacatagtctcagaagtaggattatgtaacatcagcttcgataaaatgactgggttatttagtctcacacattcgctcatacatgtatgaccattaactacagagtctacactaaaatgattgaacaatagatagtctaccattgtttcgtattcagatagtacagcgtagtacatggcatcttcacaaattatatcattgtctaatagatatttgacgcatcttatggatcccacttcaacagccatcttaaaatcggtagaatcatattgctttcctttatcattaataatttctagaacatcatctctatcataaaagatacaaatattaactgtttgatccgtaataacattgctagccgatagcaatttgttaataagatgcgctgggctcaatgtcttaataagaagtgtaagaggactatctccgaatgtgttttgtttattaacatccgttgatggaagtaaaagatttataatatctacattcttgactgatttagagcatacaatatggagaggtgtatttccatcatgatccgtttttgagggactaattcctagtttcatcatccatgagattgtagaagcttttggattgtctgacataagatgtctatgaatatgatttttaccaaatttatccactattctggcttcgaatccgatagacattatttttttgaacactttttctgaaggatctgtacacgccaacaacggaccacatccttcttcatcaaccgagttgttaatcttggctccatactgtaccaataaatttattctctctatgacttcatcatctgttcccgagagataatatagaggtgttttattctgtttatcgcacgcgtttggatctgcaccgtgtgtcagcagcgttgcaactattctattattattaattttagaagctatatgcaatggataatttccatcatcgtccgtctcatttggcgagtatcctctatgaagaagttcttcaacaaatcgttcatctagtcctttaattccacaatacgcatgtagaatgtgataatttccagaaggttcgattgttcgcagcatattcctaaatacatctaaatttttactattatacttggcataaagatatagataatactcgtctgatataattttgtccattgtagtataaaaattaatatttctatttctgtatatttgcgacaatttactctctataacaaatatcataacttagttcttttatgtcaagaaggcactggtttagttcatctataaatgtcacaccataactaccacgcatgtcatactcagaattatgataaagatatttatccttgggtgcaggtaatggggattaatctttgttggatcagtctctaagttaacacacgtcacacatgatccatttatagttatatcacacgatgatgatttatgaattgattccggaagatcgctatcgcattttgtggttccacaattcatttccatacatgttattgtcacactaatattatgatgaactttatctagtcgctgagtggtaaacaacagaacagatagtttattatcttttccaactccctcagccgccgccacaaatctctgatccgtatccatgatggtcatgtttatttctagtccgtatcctgtcaacactatgttagcatttctgtcgaaatagttttcattcatatgacactcgcccataatagtagaactaatgttgtaatttacaccaatagcgacttcggctgcaaagtaccaaataccggtaatcttgtcgaggaggacacgccgtgttcttgtattctgtcgaatacccgagagatacgatacaaaagagtaagactaatttgtaaaccatcttacacaaaatatgtaacaatagtactatgtaatcaatgagtaataaaacaataggaaccctctatacacgtaattattctatcaattttaccaattagttagtgtagtgttttaacaaaaatgtgggagaatctaattagtttttcttacacaattgacgtacattagtctgagttccttgtttttgctaattatttcatccaatttattattcttgacgatatcgagatcttttgtataggagtcagacttgtattcaacatgcttttctataatcatcttagttatttcggcatcatccaatagtacattttccagattaacagagtagatattaatgtcgtatttgaacagagcctgtagtatttccaggtctttgttatctatagccaatttgatgtcgggaatgaagagaagggaattgttagtgttggtagatgccatatagtcgatcaagagaatcatcatatccacgtgtccattttttatagtgatatggatacaactaaggagaatagctagatcaaaagtagatggtatctctgaaagaaagtatgatacaatacttacatcattaagcatgacggtatgataaaatgaagttttccatccagttttcccatagaacatcagtctccaatttttcttaacaaacagtttcaccgtttgcatgttaccactatcaaccgcataatacaatgcggtgtttcctttgtcatcaaattgtgaatcatccattccactgaatagcaaaatctttactattttggtatcttctaatgtggctgcctgatgtaatggaaattcattctctagaagatttttcaatgctccagtgttcaacaacgtacatactagacgcacgttattatcagctattgcataatacaaggcactatgtccatggacatccgccttaaatgcatctttgctagagagaaagcttttcagctgcttggacttccaagtattaattcgtgacagatccatgtctgaaacgagacgctaattagtgtatatgttttcattttttataattttgtcatattgcaccagaattaataatctctaatagatctgattagtagatatatggctatcgcaaaacaacatatacacttaataaaaataatattcattaaggagattcagattccaccgtacccatcaatataaataaaataatgattcattaccttacccatataaacaatattaaggagattccaccttacccataaacaatataaatccagtaatatcatgtctaatgatgaacacaaatggtgtattaaattccagttctgtaggagatgatctcgccgtagataccatgatagtagatgcctccgctacagttccttgttcgtcgacgtctatctttgcattctgaaacattttatagatatataacgggtccctagtcatatgtttaaacgacgccttatctggattaaacataccaggagcaatcatttcggctatcgacttaatatccctcttattttcgatagaaaatctagggagtttaagattgtacattttattccctaattgagacgaccaatagtctaattttgcagccgtgatagaatctgtgaaatgggtcatattatcacctattgctaggtacatactaatattagtatccttatacggaaggcgcgccatatcatattcttcgtcatcgaccgtgattgtatttccttgcaatttagtaactacgttcatcatgggaaccgttttcgtaccgtacttattagtaaaactagcattgtgtgttttagcgatatcaaacggacattgccacgtacctttaaaatatatagtattaatgattgtccatagagtattatcatcaagcatagtagaatcaactacattagacataccggatctacgttctactatggaattaattttatcaaccggatctcgtctaaagtttaatctatatagaccgaatctatgatattgttgataatacgacggtttaatacacacagtattatctacgaaactttgataagttagatcagtgtacgtatatttagatgttttcagcgtagctaatcctgatattaattctgtaaatgctggacccagatccctttttctcaaatccatagtcttcaatagttctactctagtattacctgatgcaggcaatagcgacataaacatagaaaatgaatagccaaatggcgagaagacaatattatcatcctcattcccatcttgaatatttttatacgctaatataccggcattggtaaatccttgtaggcgataggcggatgctgtacacgctaacgataatatcaataacgcaatcatgattttatggtattaatactttaccttatttttatgtttggtataaaaattattgatgactgtacatccttttgtataatcaagtctaagtactttaacttttacagtttttcctaagtttatccctatattcaacatatctatccatatgcatcttaacactctctgccaagatagcttcagagtgaggatagtcaaaaaagataaatatatagagcataatcattcttgtatactctgccctttattacatcgcccgcattgggcaacgaataacaaaatgcaagcatcttgttaacgggctcgtaaattgggataaacttatgtttttatatctattttattcaagagaatattcgggaatttctttttctggttgtatgtcttcaccgtagatatcatttgtacactgtttcatattttttaatagtctacatcttttagtaggactagtatcgtataattcatagctgtattttgaattccaatcacgaataaaaatatcttccaattgttggcgaagacctaatccatcatctggtgtaatattaatagatgctccacatatatccgtaaagtaatttcctgtccaatttgaggtacctatatacgccgttttatcggttaccatatatttggcatggtttactctagaatatggaatgggaggatcggcatccggtacaataaacagttttacatctatatctatgtttttagattttagcatagctatagatcttaaaaagtttctcataataaacgaagatcgttgccagcaactaatcaatagcttaactgacacttgtctgtctatagcggctcttcttaattcatcttctatataataccaaaacaaaattttacccgccttcgaataaataataggaataaagttcataacagatacataaacgaatttactcgcatttctgatacatgacaataaagcggttaaatcattggttctttccatagtacatagttgttgcggtgcagaagcaataaatacagagtgtggaacaccacttacgttcatactaagaggatgatctgtattatatataatacgcaggataaaagtttctccaattatatggtagattgttaactccaagataccagtatacctcaaaaatttgagtgagatccgctgccaagttcctattattgaagatcgcaatacccaattccttgacctgagttagtgatctccaatccatgttagcgcttcctaaataaatatgtgtattatcagatatccaaaattttgtatgaagaactcctcctaggatatttgtaatatctatgtatcgtacttcaactccggccatttgtagtgtttcaacatcctttaatggtttgttggatttattgacggctactctaacacgtactcctcttttgggtaattgtacaatctcgtttaatattatcgtgccgaaattcgtacccacttcatcagataaactccaataaaaagatgatatatctagtgtttttgtggtattggatagaatttccctccacacgttaaatgtagacaaatatactttatcaaattgcatacctataggaatagtctctgtaatcactgcgatggtattatccggattcattttatttgttaaaaaataatcttataactttactctattaaaaatccaagtttctatttctttcatgactgattttttaacttcgtccgtttccttatgaagatgatgtttggcaccttcataaatttttatttctctattacaatttgcatgttgcatgaaataatatgcacctgaaacatcgctaatctcattgtttgttccctggagtatgagagtcggggtgttaatcttgggaattatttttctaaccttgttggtagccttcaagacctgactagcaaatccagccttaattttttcatgattgactaatgggtcgtattggtatttataaacttcatccttatctctagatactgattctggacatagctttccgactgacacatttggtgtgatggttcccataagtttggcagctagcagattcagtcttggaacagcgtctgcattaactagaggagacattagaatcattgctgtaaacaagtttggattctcgtaagcggccagtatagaaattgttgctcccatggaatgacccaataagaagactggaactcctggataagtagatttaatagtcaccacgtgttgtaccacatctctaacatacgtaccaaagtcatcgatcatcattttttcaccattacttcttccatgtccaatatgatcatgtgaaaatactaaaattcctaacgatgatatattttcagctagttcatcataacgtccagaatgttcaccagctccatggcttatgaataccaatgccttaggatatgtaataggtttccaatatttacaatatatgtaatcattgtccagattgaacatacagtttgcactcataattcacgttatataactatcaatattaacagttcgtttgatgatcatattatttttatgttttattgataattgtaaaaacatacaattaaatcaatatagaggaaggagacggtactgtcttttgtgagatagtcatggagactacatcagattacgaggatgtcgtttttactttgtggatgatgaactatgtagccgtgactccatcatcgatctaatagatgaatatatcacgtggagaaatcatgttatagtgtttaacaaagatattaccagttgtggaagactgtacaaggaattgatgaagttcgatgatgttgctatacggtactatggaattgataaaattaatgagattatcgaggctatgagcgaaggagaccactacatcaatcttacagaagtccatgatcaggaaagtctattcgctaccataggaatatgtgctaaaatcactgaacattgggatacaaaaagatttcagaatctagcttccaatcattgggaaacattacagatctgatgaccgacgataatataaacatcttgatattttttttctagaaaaaaattgaattgatgatatcggattcttcataacgcataaattattacgttaatgtattctatatccagtgttaaaaaaattatcatatcatgtatttgagagtcttatatgtagcaaacatgataacagcaatacccataagctttagatattcacgcgtgctagtggttgcattatctctcggtgtggaaaaaatgtccgttatataatctacaaaataatcatcgcatatagtatgcgatagtagagtaaacatttttatagtttctactggattcatacatcgtctacccagtttggttatgaatgaaattgttatcaatcttacacccaaccccttgttatccattagtatagtattaactttgttatttatgtcataaactgtaaatgattctgtagatgctgcaatatcatcacacatgatatttatgtccctactataatcattattaactttatcacaatacatgttgataatatctatgtatgatctagtttttgtgggcaactgtctatacaagtcgtctaaacgttgtttacccatatagtattgaacagccatcattacatggtcccgttccgttgatagataatcgagtatgttagtggacttgtcaaatctatataccatattttctggaagtggatatacatagttgtgatcatcattatcgctagccttatcctctatatcctgtactataccattatctatatcctgtactataccattatctatatcctgtactataccattatctatatcctgtactataccattatctatatcctgtactataccattatctatatcctgtactataccattatctatatcctgtactataccattatctatatcctgtactataccattatctatatcctgtactataccattatctatatcctgtactataccattatctatatcctgtactataccattatctatatcctgtactataccattatctatatcctgtactataccattatctatatcctgtactataccattatctatatcctgtactataccattatctatatcctgtactataccattatctatatcctgtactataccattatctatatcctgtactataccattatctatatcctgtactataccattatctatatcctgtactataccattatctatatcctgtactataccattatctatatcctgtactataccattatctatatcctgtactataccattatctatatcctgtactataccattatctatatcctgtactataccattatctatatcctgtactataccattatctatatcctgtactataccattatctatatcctgtactataccattatctatatcctgtactataccattatctatatcctgtactataccattatctacgatattatacataaacatcgacaaaatactattgtccattatctaagtccagttgatccaaatccttgagctcctctatctgtactatctagagattgtacttcttccagttctggataatatatacgttgatagattagctgagctattctatctcccgtatttacattgaaagtacattttccattattaataagaatgactcctatgtttcccctataatcttcgtctattacaccgcctcctatatcaataccttttagggacagaccagacctaggagctattctaccatagcagaacttaggcatggacatactaatatctgtcttaattaactgtctttctcccggagggatagtataatcgtaagcgctatacaaatcatatccagcggcgtgatttgattgcctagtaggagatttagctctgttagtttccttaacaaatctaactggtgagttaatattcatgttgaacataaaaatattattttatttcaaaattatttaccatcttatcccattccatatattccatgaataagtgcgattattgtacacttctatagtatctatatacgatccacgataaaatcctcctatcaatagcagtttattatccactatgatcaattctggattatccctcggataaataggatcatctatcagagtccatgtattgctggatccacaataaaattcagcatttctaccaaccaagaataaccttctaccgaacactaacgcgcatgatttataatgaggataataagttgatggtccaaactgccactgattatgattgggtagcaaatattctgtagttgtatccgtttcagaatgtcctcctattacgtatataacattgtttatagacgcgatcgctggattatatctaggtttcagaagactcggcatattaacccaagaagtatctccgtggaaccaacactcgacagatgtgggatttggtagacctcctactacgtataatttattgttagcagctaccccgctagcatacagtctgggactattcatcggaggaattggaatccaattgtttgatgtacaatttaacgctatagcattgttatgtatttcattgttcatccatccaccgatgagatatactacttctccaacatgagtacttgtacacatatggaatatatctataatttgatccatgttcatatgatactctatgaatggatacttgtatgatttgcgtggttgtttatcacaatgaaatattttggtacagtctagtatccattttacattatttatacctctgggagaaagataatttgacctgattacatttttgataaggagtagcaaatttcctaatcgatttcttcgcttcatataccacttaatgacaaaatcaactacataatcctcatctggaacatttagttcattgctttctagaataagtttcatagatagataatcaaaattgtctatgatgtcatcttccagttccaaaaagtgtttggtaataaagtctttagtatgacataagagattggatagtccgtattctatacccatcatgtaacactcgacacaatattcctttctaaaatctcgtatgataaagtttatacaagtgtagatgataaattctacagaggttaatatagaagcacgtaataaattgacaacgttatgactatctatatatacctttccagtatatgagtaaataactatagaagttaggctgtgaatgtcaaggtctagacaaacccttgtaactggatctttattttttgtgtatttttgacgtaaatgtgtgcgaaagtaaggagacaactttttcaatatcgtagaattgactattatattgcctcctatagcctcaataattgttttgaatttcttagtcatagacaatgctaatatattcttacagtacacagtattgacaaatatcggcatttatgtttctttaaaagtcaacatctaaagaaaaatgattgtcttcttgagacataactcccattttttggtattcacccacacgtttttcgaaaaaattagtctttccttccaatgatatattttccatgaaatcaaacggattggtaacattataaatttttttaaatcccaattcagaaatcaatctatctgcgatgaattctatatatgttttcatcatttcacaattcattcctataagtttaactggaagagccacagtaagaaattcttgttcaatagagaccgcgtctgttataatagatcttactgtttcttcactcggtggatacaataaatgtttaaacatcaaacatgcgaaatcgcagtgcagaccctcatctctactaattaattcgttggaaaacgtgagtccgggcattaggccacgctttttaagccaaaatatagacgcaaatgatccagaaaagaagattccttctactgccgcaaaggcaataagtctctctccataaccggcactgtcatgtatccacttttgagcccaatcggccttcttttttacacaaggcatcgtttctatggcattaaagagatagtttttttcattactatctttaacatatgtatcgatcaaaagactatacatttctgaatgaatgttttcaatggccatctgaaatccgtagaaacatctggcctcggtaacctgtacttctgtacaaaatcgttcagctaaattttcgttcactattccgtcactggctgcaaaaaacgccaatacatgttttataaaatatttttcgtccggtgttaatttattccaatcattgatatctttagatatatctacttcttctaccgtccaaaatgatgcttctgcctttttatacatattccagatatcatgatattgaattgggaaaataacaaatctatttggatttggtgcaaggatcggttccataactaaattaacaaatagtagtattttttttcagttatcatctatatgactgtatttggatcttttgtacatcgctatcgccgcaatcactacaataattacaattattattgatagcattgttattagtactatcataattaaattatcgatgtccatgggtgaggaataatcgttatcatcattatcattttgtaattgtgacatcatgctagataaatcatttgtgagattgttgtgggaagggcatggaggatgtattatcgttattatttaacgcctcccattctgattcacaaatatgacgcgcgttcaacattttatggaaacgataattttgtgaaaacaagcaacaagaaaactcgtcatcgttcaaattttaacgatagtaaaccgattaaacgtcgagctaatttctaacgctagcgactctgttggatatgggtttccagatatatatcttttcagctcccctacgtaccacctataatcatctgtaggaaaatggaaggtatgtacatctatctactgttcctaatatcatatatggtggtgtagtagaaccattaagcacgaaagattttatttcgcatcgtattttaacttcgcaataatttctggttagataacgcactctaccagtcaagtcaatgatattagcctttacagatatattcatagtagtcgtaacgatgactccatcttttagatgcgatactcctttgtataaccagaatctttgtatctcagactcgatatatttaaacaagttaatgagatatttactcgttttatgaacgtcgatatatatccagaagttctatcctctgtggctagcgctataaccttatcattataataccaaaagtgtgattagtatgtgatacgtcagtgtgggtacaaatatgtacattatcgtctacgtcgtactcgatgcatccgcatacacccaataaatataaaatgataaatgttctaacaacgctcgtacccatcttgatgcggcttaataagtgttttgatttcaatttattgtaaaaaaagaatcggttttatactgttctagattctcattgattatattctcatctatcatctccacacagtcaaatccgtggttagcatgcacctcatcaaccggtaaaagactatcggactcttctatcattataactcgagaatatctaattcggtcattattaatcaagtcaattatcttatttttaacaaatgtgagtattttactcatttttataaaaaaatttagaaatatacagactctatcgcgtgtctatatcttctttttatatccaatgtatttatgtctgatttttcttcatttatcatatataatggtccaaattctacacgtgtgttgaattcatccagatcattaaggttcttataatcgtaacatccttctcctccctcttctacatcttccttcttattcttattcttattcttagcgtcacggaatctaccacagcaggatcccatgacgagcgtcatattaaactaattcattttcaattataaaatatactgattagtaatgaccattaaaataaatattcttcataaccggtaagaaagtgaaaagttcacattgaaactatgtctatacatcatgaaatgatgatatatatattctattttggtggaggattatatgatataattcgtggataatcattcttaagacacatttcttcattcgtaaatcttttcacgttaagtgagtgtccatattttgcaatttcttcatatgatggcggtgtacgtggacgctgctgttcctgttcttgttgtggccgcctactgtcgtgtttgcgtttagatccctccattatcgcgattgcatagatggagtactattttataccttgtaattaaaattttattaattaaacgtataaaaacgttccgtatctgtatttaagagccagatttcgtctaatagaacaaatagctacagtaaaaataactagaataatcgctacacccactagaaaccacggatcgtaatacggcaatcggttttcgataataggtggaacgtatattttatttaaggacttaacaattgtctgtaaaccacaatttgcgtccgccgatcctgtattaactatctgtaaaagcatatgttggccgggcggagccgaacattctccaatattcaatttttgtatatctataatgttattaacctccgcatacgcattacagttcttttctagcttggatactgcactaggtacatcatctagatctattcctatttcctcagcgatagctcttctatccttttccggaagcaatgaaatcacttcaataaatgattcaaccatgagtgtgaaactaagtcgagaattactcatgcatttgttagttattcggagcgcgcaatttttaaactgtcctataacctctcctatatggatagcacaagtgacattagtagggatagaatgttgagctaatttttgtaaataactatctataaaaagattatacaaagttttaaactctttagtttccgccatttatccagtctgagaaaatgtctctcataataaatttttccaagaaactaattgggtgaagaatggaaacctttaatctatatttatcacagtctgttttggtacacatgatgaattcttctaatgctgtactaaattcgatatctttttcgatttctggatatgtttttaataaagtatgaacaaagaaatggaaatcgtaataccagttatgttcaactttgaaattggtttttattttcttgttaatgattccagccacttgggaaaagtcaaagtcgtttaatgccgatttaatacgttcattaaaaacaaactttttatcctttagatgaattattattggttcattggaatcaaaaagtaagatattatcgggtttaagatctgcgtgtaaaaagttgtcacagcatggcagttcgtaaattttaatgtataacagagacatctgtaaaaagataaactttatgtattgtaccaaagatttaaatcctaatttgatagctaactcggtatctactttatctgccgaatacagcgctaagggaaaaattataatgtttcctctttcgtattcgtagttagttctcttttcatgttcgaaaaagtgaaacatgcggttaaaatagtttataacattaatattactgttaataactgccggataaaagtgggatagtaatttcacgaatttgatactgtcctttctctcgttaaacgcctttagaaaaactttagaagaatatctcaatgatagttcctggccatccatagtttgtatcaataatagcaacatattaagaacccgtttatacagagtatgtaaaaatgttaatttatagtttaatcccatggcccatgcacacacgattaattttttttcgtctccctttagattgttgtatagaaatttgggtactgtgaactccgccgtagtttccatgggactatataattttgtggcctcgaatacaaattttactacatagttatctatcttaaagactataccatatcctcctgtagatatgtgataaaaatcgtcgtttataggataaaatcgtttatccttttgttggaaaaaggatgaattaatgtaatcattctcttctatctttagtagtgtttccctattaaaattcttaaaataatttaacaatctaactgatggagcccaattttggtgtaaatctaattgggacattatattgttaaaatacaaacagtctcctaatataacagtatctgataatctatggggagacatccattgatattcaggggatgaatcattggcaacacccatttattgtacaaaaagccccaatttacaaacgaaagtccaggtttgatagagacaaactattaactattttgtctctgtttttaacacctccacagtttttaatttctttggtaatgaaattattcactatatcagtatcttctttatctaccagagattttactaacttgataacctttgctgtctcattcaatagggtagtgatatttgtatgcgtgatattgatatctttttgaattgtttcttttagaagtgattctttgatggtgtcagcatacgaattacagtaatgcagaaactcggttaacatacaggaattatagtaggcaaattccaattgttgcctgtattgtattagagtgtcaatatgagcaatggtgtcattgcgtttctctgatagaatgcgagcagcaattttggcgttatcatttgacgatatttctggaatgatgaatcctgtttctactaactttttggtaggacaaagtgaaacaatcaagaagatagcttctcctcctatttgtggaagaaattgaactcctctagatgatctactgacaatagtatctccttgacagatattggaccgaattacagaagtacctggaatgtaaagccctgaaacgccctcattttttaagcagattgttgcagtaaatcctgcaccgtgtccaagatagagcgctcctttggtgaatccatctctatgtttcagtttaaccaagaaacagtcagctggtctaaaatttccatctctatctaatacagcatccaacttgatgtcgggaactataaccggtttaatgttatatgtaacattgagcaaatccttaagttcataatcatcgctgttatcagttatgtacgagccaaacaatgtttctactgacatagtggatacgaagatgctatccatcagaatgtttccctgattagtattttctatatagctattcttctttacacgattttccaaatcagtgacgatgttcatttttttaggagtaggacgcctagtcagtatggaagatgattttctagatcctctcttcaacatttttgatctcaatggaatgcaaaaccccatagtgcaacaaccaatggtgtaacaaccgacgataaaaaataatattgtttttcactttttataattttaccatctgactcatggattcattaatatctttatacgagctactaatgtataattctttataactaaactgagatatatacactggatctatggtttccataattgagtaaatgaatgctctgcaataactaatggcaaatgtatagaacaacgaaattatactagagttgttaaagttaatattttctatgagctgttccagtaaattatttgttgtggctgcgttcaagtcataaatcatcttaatactatccagtaaacagtctttaagttctggaatattatcatcccattgtaaagcccctaattcgactatcgaatatcctgctctgatagcagtttcaatatcgacggacgtcaatactgtaataaaggtggtagtattgtcatcatcgtgataaacaacaggaatatggtcattggtaggtactgcgactttacacaacgcgatatataactttccttttgtaccatttttaacgtagttgggacgtcctgcaggatattgttttgaagaaatgatatcgagaacagatttgatacgatatttgttggattcctgattattcactataatataatctagacagatagatgattcgataaatagagaagatatatcgttggtaggataatacatccccattccagtattctcggatactctattgatgacactagttaagaacatgtcttcaattctagaaaacgaaaacatcctacacggactcattaaaacttctagagctcctgattgtgtctcgaatgcctcgtacaaggatttcaaggatgccatagattctttgaccaacgatttaatattgcgtttagcatctgatttttttattaaatcgaatggtcggctctctgatttactgccccaatgatagcaatagtcttgtaaagataagccgcaagaaaatttatactcatccatccagataactctagcaccatcggatgatattagtgtattattatagattttccatccacagttattgggccagtatactgttagcaacggtatatcgaatagattactcatgtaacctactagaatgatagttcgtgtactagtcataatatctttaatccaatctaagaaatctaaaattagatcttttacactgttaaagttaacaaaggtattacccgggtacgtggatatcatatatggtattggtccattatcagtaatggctccataaactgatacggcgatggtttttatatgtgtttgatctaatgaggacgaaattcgcgcccacaattcatctctagatatgtatttaatatcaaacggtaacacgtcaatctcgggacgcgtatatgtttctaaattcttaatccaaatataatgatgacctatatgccctattatcatactgtcgactatagtatacctagagaacttacgatacatctgtttcctgtaatcgttaaattttacaaatctataacatgctaaaccttttgacgacaaccattcattaatttctgatatggaatctgtattctcgataccgtatcgttctaaagccagtgctatatctccctgttcgtgagaacgctttcgtataatatcaatcaacggataatctgaagtttttggagaataatatgacacatgatctatttcgtccataaacaatctacgcataggaattggcggcgacgatcttaattttgtgcaatgagtcaatcctataacttctaatcttgtaatattcatcatcgacataacactatctatgttatcatcgtatattagtataccacgaccttcttcatttcgtgctaaaatggtatacagtcttaaatagttacgcaatatctcaatagtttcataattgttagctgttttcatcaaggttcgtaccctgtttaacatgatggtgttctatacgtctctattttctatttttaaattttcaacgatttactgtggctagatacccaatctctctcaaatatttttttagcctcgcttacaagctgtttatctatactattaaaactgacgaatccgtgattttggtaatgggttccatcgaaatttgccgaagtgatatgaacatattcgtcatcgactatcaacaattttgtattattctgaatagtgaaaaccttcacagatagatcattttggacacacaatgcatctagacttctagcggttgccatagaatatacgtcgttcttatcccaattaccaactagaagtctaatcttaactcctctattaatggctgcttctataatggagttgtaaatgtcaggccaatagtagctattaccgtcaacacgtgtagtgggaactatggccaaatgttcaatatctatactagtcttagctgacttgagtttatcaataactacatcggtgtctagatctctagaatatcccaataggtgttctggagaatcagtaaagaacactccacctataggattcttaatatgatacgcagtgctaactggcagacaacaagccgcagagcataaattcaaccatgaattttttgcgctattaaaggctttaaaagtatcaaatcttctacgaagatctgtggccagcggaggataatcagaatatacacctaacgttttaatcgtatgtatagatcctccagtaaatgacgcgtttcctacataacatctttcatcatctgacacccaaaaacaaccgagtagtagtcccacattattttttttatctatattaactgttataaaatttatatccgggcagtgactttgtagctctcccagatttctcttccctcgttcatctagcaaaactattattttaacccctttttcagatgcctcttttagtttatcaaaaataagcgctcccctagtcgtactcagaggattacaacaaaaagatgctatgtatatatatttcttagctagtgtgataatttcgttaaaacattcaaatgtcgtcaaatgatcggatctaaaatccatattttctggtagtgtttctaccagcctacattttgctccagcaggcaccgatgcaaatggccacatttagttaacataaaaacttatacatcctgttctaccaacgattctagaatatcatcggctatatcgctaaaattttcatcaaagtcaacatcacaacctaactcagttaatatattaagaagttccacgatttcatcttcgtccatatacatatccaatgcagatggttgactgattatcgagtttaaatcagtactaatatccaatccttcagaatacactctgtgtttcatcgtaatcctccgtatttaagctggtagatttttcaattatgtatcaatatagcaacaacagttcttgctcctccttgattctagcatcctcttcattattttcttctacgtacataagcatgtccaatacgttagacaacacaccgacaatggcggccgccacagacacgaatatgactagaccgaggaccatttaaaaaacactctctagctttcacttaaactgtatagatcattcttttatcacgtgtataataaaaaacattattctatttcgaatttaggcttccaaaaatttttcatccgtaaaccgataataatatatatagacttgttaatagtcggaataaacagattaatgcttaaactatcgtcatctccacgattagagatacaatacttacattctttttgctgtttcgaaactttatcaatacatgttaatacaaacccaggaaggagatattgaaactgaggctgctgaaaatgaaatggcgaatacaatagttcagataatgtaaaatcatgattccgtattctgatgatattagaactgctaatggatgtcgatggtatgtatctaggagtatctattttaacaaagcatcgatttgctaatatgcaattatccttttgattaattgttattttattcatattcttaaaaggtttcatatttatcaattcttctacattaaaaatttccatttttaatttatgtagccccgcaatactcctcattacgtttcattttttgtctagaatatccattttgttcatctcggtacatagattatccaattgataagtgcatttagtagttttgtacattttaagtttattgacgaatcgtcgaaaactagttatcgttaacattttattatttgataccctgatattaatacccctgctgttactattatttataactgatgtaacccatgtaacattggaattaattatcgatagtaatgcatcaacgcttccaaaattgtctattataaactcaccgataatttttttattgcatgttttcatattcattaggattatcaaatctttaatcttatcacgattgtatgcgttgatattacaagacgtcattctaaaagacggaggatctccatcaaatgccagacaatcacgtacaaagtacatagaaataggttttattctattgcgcatcatagattcatatagaacgcctgtagaaatactaatttgttttactctataaaataccaatgcatctatttcatcgttttgtataacttctttccaagtgtcaaactccaaatttttttcattgatagtaccaaaatcttctatctctttaactacttgcatagataggtaattacagtgatgtctacaagctgttttttgaaactgaatcgatgcatctagaagcgatgctacactagtcacaatcaccactttcatatttagaatatatgtatgtaaaaatatagtagaatttcattttgttttttctattctataaatgaattctcattttgcgtctgcccatactccgttttatatcaataccaaagaaggaagatatctggttctaaaggccgttaaagtatgcgatgttagaactatagaatgtgaaggaagtaaagcttcctgcgtactcaaagtagataaaccctcatcgcccgcgtgtgagagaagaccttcgtctccatccagatgcgagagaatgaataaccctggaaaacaagtaccgtttatgaggacggacatgctacaaaatatgttcgccgctaatcgcgataatgtggcggcgagacttttgaactaaaatacaattatatctttttcgatattaataaatccgtgtcgcccgggttttttatctctttcagtatgtgaatagataggtattttatctctattcatcatcgaatttaagagatctgataaacattgtttgtattctcccgatgtcagcatctggtacaataatatatgcgcacataaacctctggcacttatttcatgtaccgtccccttatcactaaggagaatagtatttgagaaatatgtatacatgatattatcatgaattagatatacagagtttgtaacactctcgaaatcacacgaggtgtcggcgttaagatctaatatatcactcgataacacattttcatctagatacactagacattttttaaagctaaaatagtctttagtagtaacagtaactatgcgagtattttcatcgatgatgcatttcatcggcatattattacgagtaccatcaaagactataccatgtgtatatctaacgtattctagcatagttgccatacgcgcattaaacttttcaggatctttggatagatcttccaatctatctatttgagaaaacatttttatcatgttcaatagttgaaacgtcggatccactatatagatattatctataaagattttaggaactacgttcatggtatcctggcgaatattaaaactatcaatgatatgattatcgttttcatcttttatcaccatatagtttctaagatatgggattttacttaatataatattatttcccgtaataaattttattagaaatgccaaatctataagaaaagtcctagaattagtctgaagaatatctatatcgccgtaccgtatatttggattaattagatatagagaatatgatccgtaacatatacaacttttattatgacgtctaagatattcttccatcaacttattaacatttttgactagggaagatacattatgacgtcccattacttttgccttgtctattactgcgacgttcatagaatttagcatatctcttgccaattcttccattgatgttacattataagaaattttagatgaaattacatttggagctttaatagtaagaactcctaatatatccgtgtatgtggtcactaatacagattgtagttctataatcgtaaataatttacctatattatatgtttgagtctgtttagaaaagtagctaagtatacgatcttttatttctgatgcagatgtatcaacatcggaaaaaaatctttttttattcttttttactaacgatacgaatatgtctttgttaaaaacagttattttctgaatatttctagtttgtaattttaacatatgatattcgttcacactgggtaatctacctaaataggtttctataatctttaatgtgatattaggaagagtattctgatcaggattcctattcattttgaggatttaaaactctgattattgtctaatatggtctcaacacaaactttttcacagagcgatagagtttttgataactcgtttttcttaagaaatataaaactactgtctccagagctcactctatcttttattttatctaattcgatacaaactcctgatactggttcagaaagtaattcattaattttcagtcctttatagaagatagttaatatagataatacaaaatcttcagttcttgatatcgatcggattgatcctagaactagatatattaataaagtactcattaggcagtttatggcagcttgataattagatatagtatattccagttcatatttattagataccacattgcccagattttgatattctatgaattcctctgaaaataaatccaaaataactagacattctattttttgtggattagtatactctcttccctctatcatgttcactactggtgtccacgatgacaaatatctagagggaatataatatagtccataggatgccaatctagcaatgtcaaataactgtaattttattcttcgctcttcattatgaattaattcttgaggtataaacctaacacaaattttattattagacttttcgtatgtaatgtctttcatgttataagtttttaatcctggaatagaatctatcttaatgaggcttttaaatgcggagttctccaacgagtcaaaacataatactctgttgtttttcttatatataatattacgattttcttctttgaatggaataggtttttgaattagtttataattacaacataatagataaggaagtgtgcaaatcgtacgcggaaaaaacataatagctcccctgttttcatccatggttttaagtaaatgatcactggcttccttagtcaatggatattcgaacattaaccgtttcatcatcattgggcaaaatccatatttcttaatgtaaagagtaatcaactcattgtgtttattgtaccatcttgttgtaaatgtgtattctgttatcggatctgctcctttttctattaatgtatcgatgtcgatctcgtctaagaattcaactatatcgacatatttcatttgtatacacataaccattactaacgtagaatgtataggaagagatgtaacgggaactgggtttgttgattcacaaactattctaatacatagttcttctgttaatacgtcttgcacgtaatctattatagatgccaagatatctatataattattttgtaagatgatgttaactatgtgatctatataagtagtgtaataattcatgtatttggatatatgttccaactcggtctttgtaatctctagtttcgtaatatctatagcatcctcaaaaaatatattcgcatatattcccaagtcttcagttctatcttctaaaaaatcttcagcatatggaatataataatctattttgcctcttctgatgtcattaatgatatagtttttgacactattttccatcaattgattcttattcactatgtctaaaaaccggatagcgtccctaggacgaactactgccattaatatctctattatagcttctggacataattcatctattataccagaattaatggtaactattccgtatctatctaacatagttttaagaaagtcagaatctaagacctgatgttcatatattggttcatacatgaaatgatctctattgatgatagcgactatttcattctctgaaaattggtaactcattctatatatgctttccttgttgataaaggataggatatactcgatggaatttgtaccaacaaactgttctcttatgaatcgtatatcatcatctgaaataatcatgtaaggcatacacttagcaattagtgacttgtctcctgttatcaatatactattcttgtgataatttatgtgtgaggcaaatttgtccacgttttttaattttgttatagtggatatcaaatccaatggagctacagttcttggcttaaacagatatagtttttctggaacgaattctacaacattattataaagaactttgggtagataagtgggatgaaatcctactttaattaatgcgatcgccttgtcctcatgtaaatatccaaacgcctttgtgatagtatggcattcattatctagaaacgctctacgaatatctgtaacagatatcatctttagagaatactagtcgcattaaaagtactaaaatttgtattttttaatctatcgcaataaaaaaattaatatttatgaattcaatgtataactagaacataatcagaatctaatgatgacgtaaccaagaagtttatctacagccaatttagctgcattatttttagcatctcgtttagtttttccatcggccttatcgaatactcttccatcgatgtctacacatgcataaaatataggagagttactaggtcccactgattcaatacgaaaagaccaatctctcttagttatttgacagtactcattaataatggtgacagggttagcatttttccaatcaataatttttttagccggaataacatcatcaaaagacttatgatcctctctcattgatttttcgcgggatacatcatctattatggcatccgccatagtattagtatccggcttatccgcctccgttgttataaaccaacgaggaggaatatcgtcggatctgtacaccatagcactgcgttgaagatcgtacaaagctttattaacttctcgcttctccatattaagttgtctagttagttgtacagcagtagctccttcgagtccaatgtttttaatagcctcgcatacaatcgctgcgtcagaacactcgtcaatatagatcttagacatttttagagagaactaacaccaccagcaataaaactgaacctactttatcattttttttattcatcatcctctggcggttcgtcgttcctatcgaacgtggctctgattaacccgtcatctataggtgatgccggttctggagattctggaggagatggattattatctggaagaatctctgttatttccttgttttcatgtatcgattgtgttgtaacattaagattgcgaaatgctctaaatttgggaggcttaaagtgttgtttacaatctctacacgcgtgtctaactaacggaggttcatcagctgctctagtttgaatcatcatcggtgtagtattcctacttttacagttgggacacggtgtattgtatttctcgtcgagaacgttaaaataatcgttgtaactcacatcctttattttatctatattgtattctactcctttcttaatgcattttataccgaataagagatatcgaaggaattctttttcggtgccgctagtacccttaatcatatcacatagtgttttatattccaaatttgtggcaatagacggtttatttctatacgatagtttgtttctggaatcctttgagtattctataccaatattattctttgattcgaatttagtttcttcgatattagattttgtattacctatattcttgatgtagtactttgatgatttttccatggcccattctattaagtcttccaagttggcatcatccacatattgtgataataattctcggatatcagtagcggctaccgccattgatgtttgttcattggatgagtaactactaatgtatacattttccatttataacacttatgtattaactttgttcatttatattttttcattattatgttgatattaacaaaagtgaatatatatatatgttaataattgtattgtggttatacggctacaatttcataatgagtggaagtcagtgtcggatgatcaacgacgatagctttactttgaaaagaaagtatcaaatcaatagtgtggagtcaacaatgaaaatggataagaagaggacaaagtttcagaatagagccaagatggtaaaagaaataaaccagacaataagagcagcccaaactcattacgagacattgaaactaggatacataaaatttaagagaatgattaggactactactctagaagatatagcaacatctattccaaatattcagaaaatttataaactattctcagacatttcagccattggaaaagcatcacagaatccgagtaagatggtatatgctctactgctttatatgtttcccaatttgtttggagacgatcatagattcattctttatagaatgcatccaatgagcaaaatcaaacacaagatcttctcaccgttcaaacttaatcttattaggatattagtggaagaaagattctataataatgaatgcaaagattatagatggaaaataattggatcacaagttgataaaatattgatagctgaatctgctaaatatacaatgaatgcaatgtatcgcctaagaccgatacatagaatcaaggtagaatctgaagaagataccctcttcatcaaacagatggtagaaaaatgtgtaacatcccaggaattggtggaaaaaatgttgaagatactgtttagagatttgttcaagagtggagaatacaaagcgtacaggtacgatgatgatgtagaaaatggattcattggattggataaactaaaattaaacattgttcatgatatagttgaaccatgtatgcctgtccgcaggccagtggctaagatactgtgtaaagaaatggtaaataaatactttgagaatccgctacatattattggtaagaatcttcaagagtgcattgactttgttagtgagtagacattcatctttctcctttctccaatactaattcaaattgttaaattaataatggatagtataaaatagttattagtagtaagataagataagataagataagataagataagataagataagataagataagatagtaaaaataattattagaataagagtgtagtatcatagataagtatttactctcttctataaaaatggattttattcgtagaaagtatcttatatacacagtagaaaataatatagattttttaaaggatgatacattaagtaaagtaaacaattttaccctcaatcatgtattagctctcaagtatctagttagcaattttccccaacacgttattactaaggatgtattagataataccaatttttttgtttttatacatatggtacgatgttgtaaagtatacgaggcggttttacgacacgcatttgatgcacccacattgtatgttaaagcattgactaagaattatttatcgtttagtaacgcaatacaatcatacaaggaaaccgtgcataaactaacacaggatgaaaaatttttagaggtagctgaatacatggaagaattaggagaacttataggcgtaaattatgacttagttcttaatccattatttcacggaggggaacccatcaaagatatggaaatcatttttttaaaactgtttaagaaaacagacttcagcattgttaaaaaattaagtgttataagattacttatttgggcatacctaagcaagaaagatacgggcatacagtttgcggataatgatagacaagatatatatactctatttcaacaaactggtagaatagtccatagcaatctaacagaaacgtttagagattatatctttcccggagataagactagctattgggtgtggttaaacgaaagtatagctaatgatgcggatatcgttcttaatagacccgccattaccatgtatgataaaattcttagttatatatactctgagataaaacagggacgcgttaataaaaacatgcttaagttagtttatatctttgagcctgaaaaagatatcagagaacttctgctggaaatcatatatgatattcctggagatatcctatctattattgatgcaaaaaatgacgattggaaaaaatattttattagtttttataaagctaattttatcaacggcaatacatttattagtgatagaacatttaacgaggacttattcagagttgttgttcaaatagatcccgaatatttcgataatgaacgaattatgtctttattctctacgagtgctgcggacattaaacgatttgatgagttagatattaataaaagttatatatccaatataatttatgaggtgaacgatatcacattagatacaatggatgatatgaagaagtgtcaaatctttaacgaggatacgtcgtattatgttaaggaatacaatacatacctgtttttgcacgagtcggatcccatggtcatagataacggaatactaaagaaactgtcatctataaaaaccaagagtaaacgactgaacttgtttagcaaaaacattttaaaatattatttagatggacaattggctcgtctaggtcttgtgttagatgattataaaggagacttgttagttaaaatgataaaccatctcaagtctgtggaggatgtatccgcattcgttcgattttctacagataaaaaccctagtattcttccatcgctaatcaaaactattttagcgagttataatatttccatcattgtcttatttcaaaggtttttaagagataatctatatcatgtagaggaattcttggataaaagcatccatctaaccaagatggataagaaatatatacttcaattgataaggcacggtagatcatagaacaaaccaaacatattattaataatttgtatatacatagatataattatcacatattaaaaattcacacattttggtaaatgggaactgctgcaaccattcagactcccaccaaattaatgaataaagaaaatgcagaaatgattttggaaaaaattgttgatcatatagttatgtatattagtaacgaatcaagagatgtaaataatcctgaatatattgattttcgtaacagatacggagactatagatctctcattataaaaagtgatcacgagtttgtaaaactatgtaaaaatcatgcgaagaaaagttctccagaaacacaacaaatgattatcaaacacatctacgcacaatatcttattccggtatctgaagtactattaaaacctatgatgaccatgggtgacataattacatataacggctgtaaagacaatgaatggatgctacaacaactctctaccctaaactttaacaatctccacacgtggaactcgtgtagcataggcaatgtaacgcgtctgttttatacattttttagttatctgatgaaagataaactagatatataagtataatcccattctaatactttaacctgatgtattacctgcatcttattagaatattaacataactaaaagacataacataaaaacttattacatagttgataaaaagcggtaggctataaatattatggctacagttgttccgcgtgttgacgatgtgtacaaaaatgcacaaagaagaattctagatcaagaaacattttttagtagaggtctaagtagaccgttaatgaagaacacatatctatttgataattacgcgtatggatggataccagaaactgcaatttggagtagtagatacgcaaacctagatgctagtgactattatcccatttcgttgggattacttaaaaagtttgagtttctcatgtctctatataaaggtcctattcccgtatatgaagaaaaagtaaatactgaattcattgctaatggatctttctccggtagatacgtatcatatcttagaaagttttctgcccttccaacaaacgagtttattagttttttattattgacctccatccctatctataatatcttattctggtttaaaaacacacagtttgatattactaaacacacattattcagatacgtctatacagataatgccaaacacctggcgttggctaggtatatgcatcaaacaggtgactataagcctttgttcagtcgtctcacggagaattatatatttaccggtcctgttccgataggaatcagagatatagatcaccctaatcttagtagagcaagaagtccatccgattatgagacattagctaatattagtactatattgtactttaccaagtatgatccggtattaatgtttttattgttttacgtacctggatattcgattactacaaaaattactccagcagtagaatatctaatggataaactgaatctaacaaagagcgatgtacaactgttgtaaattattttatgcttcgtaaaatgtaggtcttgaaccaaacattctttcaaagaatgagatgcataaaactttattatccaatagattgactatttcggacgtcaatcgtttaaagtaaacttcgtaaaatattctttgatcgctgccgagtttaaaacttctatcgataattgtttcatatgttttaatatttacaagttttttggtccatggttcattagctggacaaatatatgcaaaataatatcgttctccaagttctatagtctctggattatttttattatattcagtaaccaaatacatattagggttatctgcggatttataatttgagtgatgcattcgactcaacataaacaattctagaggagacgatctactatcaaattcggatcgtaaatctgtttctaaagaacggagaatatctatacatacctgattagaattcatccgcccttcagataacatttcagacagtctggtcttgtatatcttaatcatgttcttatgaaacttggaaacatctcttctagtttcactagtacctttattaattctctcaggtacagattttgaattagacgatgccgagtatttcatagttgtatatttctttttcgattgcataatcagattcttatataccgcctcaaactctattttaaaattattaaacaatactctactattaatcaatcgttctaactcctttgctatttctatggacttatctacatcttgactgtctatctctgtaaacacggagtcggtatctccgtacacgctacgaaaacgaaatctgtaatctatagacaacgatgttttcacaatcggattaatatctctatcgtccatataaaatggattacttaatgggttggcaaatcgtaacataccatcagataactctgctccatttagtaccgattctagatacaagatcattctacgtcctatggatgtgcaactcttagccgaagcgtatgagtatagagcactgtttctaaatcccatcagaccatatactgagttggctactatcttgtacgtatattgcatggaatcatagatggccttttcagttgaactggtagcctgttttagcatctttttatatctggctctctctgccaaaaatgttctcaatagtctaggaatggttccttctatcgatctatcgaaaattgctatttcagagatgaggttcggcagtctaggttcacaatgaaccgtaatatatctaggaggtggatatttctgaagtaagagctgattatttatttcttcttccaatctattggtactaacaacgacaccgactaatgtttccggagatagatttccaaagatacacacattaggatacaggctgttataatcaaagattaatacattattactaaacattttttgttttggagcaaataccttaccgccttcgtaaggaaacttttgttttgtttctgatctaactaagatagttttagtttccaacaatagctttaacagaggacccttgatgactgtactcgctctatattcgaataccatggattgaggaagcacgtatgttgatgcacccgcgtctgtttttgtttctactccgtaatactcccacaaatactgacacaagcaagcatcgtgaatacagtatctagccatatctaaagctatgtttagattataatccttatacatctgagctaaatcaacgtcatcctttccgaaagataatttatacttatcatttgttaaagtgggacacgatagcacgactttgaatccattttcccaaatatctttatgaattactttacatataatatcctcattaaccgtcacataattacctgtagttaaaacctttgcaaatgcagcggctttgcctttcgcgtccgtagtatcgtcaccgatgaacgtcatttctctaactcctctattcaacactttggtcatacaaccaaaagcgttcttggctatagaatccaatttgtacgaatccaatttttcagatttttgaatgaatgaatatagatcgaaaaatatagttccattattgttattaacgtgaaacgtagtattggccatgccacctactcccttatgactagactgatttctctcataaatacagagatatacagcttcctttttgtctggagatctaaagataatcttctctccggttaataactctagacgattagtaatatatctcagatcgaagttatgtccgttaaaagtaacgatatagtcgaacgttagttccaacaattgtttagctatttgtaacaaaactatttcagaacatagaactagttctcgttcgtaatccatttccatcagtgactgtatcctcaaacatcctctatcgacggcttcttgcatttcctgttccgttaacatctcttcattaatgagcgtaaacaataatcgtttgccacttaaatcgatatagcagtaacttgtatgtgagattggattaataaatacagaaggaaacttcttatcgaagtgacactctatatctagaaataagtacgatcttgggatatcaaatctaggtatttctttagcaaaacagttacgtggatcgtcacaatgataacatccattgttaatctttgtcaaatattgctcgtccaacgagtaacatccgtctggagatatcccgttagaaatataaaaccaactaatattgagaaattcatccatggtggcattttgtatgctgcgtttctttggctcttctatcaaccacatatctgcgacggagcattttctatctttgatatctagattataacttatcgtctcgtcaatgtctatagttctcatctttcccatcggtctcgcattaaatggaggaggagccaatgcctgatatatttcgtcactcactacgtaataaaagtaatgaggaaatcgtataaatacggtctcaccatttcgacatctggatttcagatataaaaatctgttttcgccacgactttcgaaccaattaatgcaccgaacatccatttctagaatttagaaatatattttcatttaaatgaatcccaaacattggggaagagccgtatggactattatttttatagtactttctcaagcgggtttagatggcaacatagaagcgtgtaaaagaaaactatatactatagtcagcactcttccatgtcctgcatgtagacgacacgcaactatcgctatagaggacaataatgtcatgtctagcgatgatctgaattatatttattattttttcatcagattatttaacaatttggcatctgatcccaaatacgcgatcgatgtgacaaaggttaaccctttataaacttaacccattataaaacttatgattagttacgactgaaataacagcgtaattattttttggtataattctacacggcatagtttctgtaactatgaattcaacacccattatcttagtgaaatctttaacaaacagtaagggttcgtcaaagacataaaactcattgtttacgatcgaaatagatcccctatcacacttaaaataaaaaatatccttatcctttatcaccaaataaaattctgattggtcaatgtgaatgtattcacttaacagttccacaaatttatttattaaccccgaggcacatacatcgtcggtattttttatggcaaactttacgcgtccagcatccgtttctaaaaaaatattaacgagttccatttatatcatccaatattattgaaatgacgttgatggacagatgatacaaataagaaggtacggtacctttgtccaccatctcctccaattcatgctctattttgtcattaactttaatgtgtgaaaacactactccacatgcttccatgacagtgtgtaacactttggatacaaaatgtttgacattagtataattgtccaatactgtcaatctataatagatagtagctataatatattctatgatggtattgaagaagatgacaaccttggcatattgatcatttaacacagacatggtatcaacagatagcttaaatgaaagagaatcagtaattggaataagcgtcttctcgatggagtgtccgtataccaacatgtctgatattttgatgtattccattaaattatttagttttttctttttattctcgttaaacagcatttctgtcaatagaccccaacatcgttgaccgattaagttttggttgatttttccatgtaaggcgtatctagtcagatcgtatagcctatccaataatccatcgtctttgtgtagatcacatcgtacactttttaattctctatagaagagcgacagacatctggaacaattacagacagtaatttctttattctctacagatgtaagatacttgaagacatccctatgatgatgtagaattttggataacacggtattgatggtatctgttaccataatacctttgatggctgatagtgtcactgcacaagatttccaatctttgacaattttcagcaccattatctttgttttgatgtctatatcagacagcatggtgcgtctaacaacacagggattaagacggaaagatgaaatgattctctcaacatcttcaatagatatcttactattttttctggcattatctatatgtgtgagaatatcctctagagaatcggtatcctttttgatgatggtggatctcaacgaaatgggacgtctaaaccttcttattctatcaccagattgcatggtgatttgtcttctttcttttatcatgatgtaatctctaaattcatcggcaaattgtctatatctaaaatcataatatgagatgtttacctctacaaatatctgttcgtccaatgttagagtatctacatcagttttgtattctaaattaaacatggcaacggatttaattttatattcctctattaagtcctcgtcgataataacagagtgtagataatcatttaatccgtcgtacatggttggaagattttcgttaacaaaatctttaattgtcttgatgaatgtgggactatatctaacatcttgattaataaaatttataacattttccataggatactttgtaactagttttatacacatctcttcatcggtaagtgtagacagaatatcgtgaacaggtggtatattatattcatcagatatacgaagaacaatgttcaaatctagattgtttaatatattatatagatgtagtgtagctcctatagggatatctttaactaagtcaattatttcatcaaccgttagatctattttaaagttaatcatataggcattgatttttaaaaggtatgtagccttgactacattctcattaattaaccattccaagtcactgtgtgtaagaagattatattctatcataagcttgactacatttggtcccgataccattaaagaattcttatgatataaggaaacagcttttaggtactcatctactctacaagaattttggagagccttaatgatatcggtgacgtttattatttcaggaggaaagaacctaacattgagaatatcagaattaatagcttccagatacagtgattttggcaatagtccatgtaatccataatccagtaacacgagctggtgcttgctagacaccttttcaatgtttaatttttttgaaataagctttgataaagccttcctcgcaaattccggatacatgaacatgtcgccgatatgaatgagtttttttcagtattttatatttttctcaacaagttctcaatacaccaatagatgatagaatatcacccaatgcgtccatgttgtctatttccaacaggtcgctatatccaccaatagaagttttcccaaaaaagattctaggaacagttttaccaccagtaatttgttcaaaatagtcgcgcaattcattttcgggtttaaattctttaatatcgacaatttcatacgctcctcttttgaaactaaacttatttagaatatccagtgcgtttctacaaaaaggacatgtatacttgacaaaaattgtcactttgttattggccaacctttgttgtacaaattcctcggccattttaatatttaagtgatataaaactatctcgacttatttaactctttagtcgagatatatggacgcagatagctatatgatagccaactacagaatgcgaacgctataaaaaacataattacaacgagcatttataaatatttttattcagcattacttgatatagtaatattaggcacagtcaaatattcaaccactctcgatacattaactctctcattttctttaacaaattctgtaatatcttcgtaaaaagattcttgaaactttttagaatatctatcgactctagatgaaatagcgtttgtcaacatgctatgttttgtgtacataaatgcgcccattttaacagtttctagtgacaaaatactagcgatcctaggatcctttagaatcacatagattgacgactcgtctctcttagtaaccctagtaaaataatcatacaatctagtacgtgaaataatattatccttgacctgaggagatctaaacaacctagttttgaggacatcgataagttcatcgggaatgacatacatactatctttaatagaactcttttcatccagttgaatggattcgtccttaaccaactgattaatgagatcttctattttatcattttccagatgatatgtatgtccattaaaggtaaattgtgtagcgcttctttttagtctagcagccaatactttaacatcactaatatcgatatacaaaggagatgatttatcgatggtattaagaattcgtttttcgacatccgtcaaaaccaattcctttttgcctgtatcatccagttttccatcctttgtaaagaaattattttctactagactattaataagactaataaggattcctccgtaattgcacaatccaaactttttaacaaaactagactttacaagatctacaggaattcgtacttcaggtttcttagcttgtgattttttcttttgcgggcattttctagtgaccaactcatctaccatttcattgattttagcagtgaaataagctttcaatgcacgggcactgatactattgaaaatgagttgatcatcaaattccgccatttaagttcaccaaacaacttttaaatacaaatatatcaatagtagtagaataagaactataaaaaaaataataattaaccaataccaaccccaacaaccggtattattagttgatgtgacagttttctcgtcacttagaacagatttaacaatttctataaagtctgtcaaatcatcttccggagaacccataaatacaccaaatatagcagcgtacaacttatccatttatacattgaatattggcttttctttatcgctatcttcatcatattcatcttcaatatcaacaagtcccaggttacgagccagatcttcttctacattttcagtcattgatacacgttcactatctccagagagtccgataacgttagccaccacttctctatcaatgattagtttcttgagagcgaaagtaatttttgtttctgttccggatctatagaagacgataggtgtgataattgccttggccagttgtctttctcgtttacccagtgcttctagttcgccttctatagatctgagaatagatgattctccagccgaaacatattctaccatggctccgtttaatttgttgatgaagatggattcatccttaaatgttttctctgtaatagtttccaccgaaagactatgcaaagaatttggaatgcgttccttgtgcttaatgtttccatagacagcttctagaagttgatacaacataggactagccgcggtaacttttatttttagaaagtatccatcgcttctatcttgtttagatttatttttataaagtttagtctctccttccaacataataaaagtggaagtcatttggctagataaactatcagtaagttttatagagatagacgaacaattagcatattgagaagcatttagtgtaacgtattcgatacattttgtattagatttactaatcgattttgcatactctataacaccagcacaagtctgtagagaatcgctagatgctgtaggtattggtgaagtttcaactctcttcttgattaccttactcatgattaaacctaaataattgtactttgtaatataatgatatatattttcactttatctcatttgagaataaaaatgtttttgtttaaccgctgcatgatgtacagatttcggaatcgcataccatggacggttttattttttccttgtccaatgtaaactgaatgggagaggatgcggctttcgtacgtagatagtacatgcctgtttttagaccgagactccatccgtaaaaatgcatactcgttagtttggaatagctaggatcggctatgtgaatattcatcgactgactttgatcgatgaaggctcccctgtctgcagccatttttatgatcgtcttttgtggaatttcccaaatagttttataaactcgcttaatatcttctggaaggtttgtattctgaatggatccaccatctgcaataatcctatttttgatctcttcattccataattttctctcggttaaaactctaaggagatgaggattaactacttgaaattctccagacaatactctacgagtgtaaatattactggtatacggttccactgactcattatttcccaaaatttgagcagttgatgcagtcggcataggtgccaccaatagactatttctaagaccatgtgatcggattttatcttttagagattcccaattccaaagatccgatggtacaacattccaaagatcgtattgtagaatgccgttactagcgtatgatcctgcatatgtatcgtatggtccttctttttcggctagttcacaactcgcctctaatgctccataataaatggtttcgaaaatcttcttattgagatcttgtgcttccgggctatcaaatggataatttaagagaataaacgcgtctgctaatccttgaacgccaataccgataggtctgtgtctcttattagaaatttcagcttctggaataggataataattaatatctataattttattgagatttctgactattactttgaccacatcctttagtttgagaaaatcaaatctcccatctattacaaacacgttcaaggcaacagatgccagattacaaacggctacctcattagcatcggcatattgtataatttcagtgcaaagattactacacttgatggttcctaaattttgttgattactctttttgttacacgcatccttataaagaataaacggagtaccagtttcaatctgagattctataatcgctttccagacgactcgagcctttattatattcttgtatctcttttctctttcgtattgtgtatataatcgttcgaactcgtctccccaagcattgtctaatccaggacattcattcggacacatcaatgaccactctccatcatcatttactcgtttcataaagagatcaggaatccaaagagctataaatagatctctggttctatgctcctcgtttcctgtattctttttaagatcgaggaacgccataatatcagaatgccacggttccaagtatatggccataactcccggccgtttgtttcctccctgatctatgtatctagcggtgttattataaactctcaacattggaataataccattggatgcaccattggtcccggagatatagcttccactggcacgaatattgctaattgatagacctattccccctgccattttagagattaatgcgcatcgttttaacgtatcatagatgccctctatactatcatccatcatgttaagtagaaaacagctagacatttggtgacgactagttcccgcattaaataaggtaggagaagcgtgcgtaaaccatttttcagacagtagattgtacgtctcaatagctgattctatatcccattgatgtattcctaccgcgacacgcattaacatatgctgaggtctttcaacgatcttgttatttattttcaacaagtaggatttttccaaagttttaaaaccaaaatagttgtatgaaaagtctcgttcgtaaataataaccgaattgagtttatccttatatttgttaactatatccatggtgatacttgaaataatcggagaatgtttcccatttttaggattaacatagttgaataaatcctccatcacttcactaaatagtttttttgtttccttgtgtagatttgatacggctattctggcggctagaatggcataatctggatgttgtgtagtacaagtggctgctatttctgctgccagagtgtccaattctaccgttgttactccattatatattccttggataaccttcatagctattttaataggatctatatgatcagtgtttaagccataacataattttctaatacgagacgtgattttatcaaacataacattttcccggcatccatttcgtttaacgacaaacatttttgtcggtgtagtaaaaaatttatttaacttttcattaatagggacttgacgtacgtagcgtacaaaatgatcgttcctggtatatagataaagagtcctatatatttgaaaatcgttacggctcgattaaactttaatgattgcattgtgaatatatcattaggatttaactccttgactatcatggcggtgccagaaatcaccatcaaaagcattaatacagttatgccgatcgcagttagaacggttatagcatccgccatttatatctaaaaattagatcaaagaatatgtgacaaagtcctagttgtatactgagaattgacgaaacaatgtttcttacatattttttttttattagtaaccgacttaatagtaggaactggaaaactagacttgattattctataagtatagatgcccttccagataatattctctttgataaaagttccagaaaatgtagaattttttaaaaagttatcttttgctattaccaatattgtggttagacgcttattattaatatgagtgatgaaatccacaccgcctctagatatcgcttttatttccacattagatggtaaatccaatagtgaaactatttttttaggaatatatggactcgcatttagaggagtgaacgtcttaggcgtcggaaagaatgattcgtcaaacgaataaacaatttcacaaatggatgttaatgtattagtaggaaatttcttgacgctagtggaattgaaaattctaatggatgatgttctacctatttcatccgataacatgttaatttccgacactaacggttttaatatttcgatgatatacggtagtctctctttcggacttatatagcttattccacaatacgagtcattgtatactccaaaaaataaaataacgagtataaagtctgtatcgaatgggaaaaatgaaattatcgacataggtatagaatccggaacattgaacgtattaatacttaattctttctcagtggtaagaaccgataggttattgacattgtatggttttaaatattctataacttgagacttgatagatattaatgacgaattgaaaattatttttatcaccacgtgtgtttcgggatcatagtcgacgcccgtcaaccaaccgaatggagtaaaataaatatcattaatatatgctctagatattagtatttttattaatcctttgattatcatcttctcgtacgcgaatgattccatgatcaagagtgatttgagaacatcctccggagtattaatgggcttagtaaatagtccatcgttgcaataataaaagttgtccaagttaaaggatattatgcattcgtttaaagatatcgcctcatctgacggagacaattttttggtaggttttagagactttgaagctacttgtttaacaaagttattcatcgtcgtctactattctatttaattttgtagttaatttatcacatatcacattaattgactttttggtccatttttccatacgtttatattcttttaatcctgcgttatccgtttccgttacatccagtgatagatcttgcaagttaaatagaatgctcttaaataatgtcattttcttatccgctaaaaatttaaagaatgtataaacttttttcaaagatttgaaacttttaggaggagttctaatgcacaatatcataaacaaactaataaacatcccacattcagattccaacaattgattaacttccacattaatacagcctattttcgctccaaatgtatattcgaaaaatctgaataaaacatcaatgtcgcaatttgtattgtccaatacagaatgtcggtgattcgtgttaaaaccatcggagaaggaatagaaataaaaattattatagtggtggaattcagttggaatattgcctccggagtcataaaaggatactaaatattgttttttatcataaattacacatttccaatgagacaaataacaaaatccaaacattacaaatctagaggtagaacttttaattttgtctttaagtatatacgataagatatgtttattcataaacgcgtcaaatttttcatgaatcgctaaggagtttaagaatctcatgtcaaattgtcctatataatccacttcggatccataagcaaactgagagactaagttcttaatacttcgattgctcatccaggctcctctctcaggctctattttcatcttgacgacctttggattttcaccagtatgtattcctttacgtgataaatcatcgattttcaaatccatttgtgagaagtctatcgccttagataccttttctcgtagtcgaggtttgaagaaatacgccaacggtacactagtaggtaactcaaatacatcgtatatagaatggtagcgcgtctttaactcgtcggttagctctttcttttgatcgagttcgtcgccactattgggtctactcaagtgcccagactctactagttccagcatcataccgataggtatacaagacactttgccagcggttgttgatttatcatatttctccactacatatccgttacaatttgttaagaatttcgatacatctatattgctacataatccagctagtgaatatatatgacataataaattggtaaatcctagttctggtattttactaattactaaatctgtatatctatccatttatcatggaaaagaatttaccagatatcttcttttttccaaactgcgttaatgtattctcttacaaatattcacaagatgaattcagtaatatgagtaaaacggaacgtgaaagtttctcattggcagtgtttccagtgataaaacatagatggcataacgcacacgttgtaaaacataaaggaatatacaaagttagttcagaagcgcgtggagaaaaagtatctcccccatcactaggaaaacctgtttatataaacctaactacgaggcaatatatatacagtgagtatacaataagctttgaatgttatagttttctaaaatgtataacaaatacagaaatcaattcgttcgatgagtatatattaagaggactattagaagctggtaatcagttacagatattttccaattccgtgggtaaacgaacagatactataggtgtactagggaataagtatccatttagcaaaattccattggcctcattaacccctaaagcacaacgagagatattttcagcgtggatttctcatagacctgtagttttaactggaggaaccggagtgggtaagacgtcacaggtacccaagttattgctttggtttaattatttatttgggggattctctactctagataaaatcactgactttcacgaacgaccagtcattctatctcttcctaggatagctttagttagattgcatagcaatactattttaaaatcattgggatttaaggcactaaatggatctccgatttctttacgatatggatctataccggacgaattaataaacaaacatccaaaaaaatatggaattgtattttctacccataagttatctttaacaaaactatttagttatggcactcttattatagacgaagttcatgagcatgatcaaataggagatatcattatagcagtagcgagaaagcatcatacgaaaatagattctatgtttttaatgactgccacgttagaggatgacagggaacgtctaaaagtatttttacccaatcccgcatttatacatattcctggagaaacactctttaaaattagtgaggtgtttattcataataagataaatccatcttccagaatggcatacatagaagaagaaaagagaaatttagtcactgctatacagatgtatactcctcctgatggatcatccggtatagtctttgtggcaacagtctcgcagtgtcacgaatataaatcatatttagaaaagagattgtcgtatgatatgtatattattcatggtaaggtcttagatatagacgaaatattagaaaaagtgtattcatcacctaacgtatcgatacttatttctactccttatttggaatctagcgttactatacgcaatgttacacacatttatgatatgggtagagtttttgtcccagctccttttggaggatcgcaacaatttatttctaaatctatgagagatcaacgaaaaggaagagtaggaagagttaatcctggaacgtacgtctatttctatgatctgtcgtatatgaagtctatacagcgaatagattcagaatttctacataattatatattgtacgctaataaatttaatctaacacttcccgaagatttgtttataatccctacaaatttggatattctgtggcgtacaaaggaatatatagactcgttcgatattagtacagaaacatggaataaattattatccaattattatatgaagatgatagagtatgctaaactttatgtactaagtcctattctcgctgaggagttggataactttgagaggacaggagaattaactagtactgtacgagaagccatttcatctctaaatttacgaatcaagattttaaattttaaacgtaaagatgaggatacgtatatacacttttgtagaatattattcggcgtctataatggaacaaacgctactatatattatcatagacctctaacaggatatatgaatatgatttcagatactatatttgttcctgtagataataactaaaatcaaactctaatgaccacatctttttttagagatgaaaaattttccacatctccttttgtagacacgactaaacattttgcagaaaaaagtttattagtgtttagataatcgtatacttcatcagtgtagatagtaaatgtgaacagataaaaggtattcttgctcaatagattggtaaattccatagaatatattaatcctttcttcttgagatcccacatcatctcaaccagagatgttttatccaatgatttacctcgtactataccacatacaaaactagattttgcagttacgtcgtaccttgtattcctaccaaacaaaattttacttttagttcttttagaaaattctaaggtagaatctctatttgtcaatatatcatctatggaattgccactagcaaaaaatgatagaaatatatattgatacatcgcagctggttttgatctactatactttaaaaacgaatcagattccataattgcctgtatatcatccgctgaaaaactatgttttacacgtattccttcggcatttctttttaatgatatatcttgtttagacaatgataaagttataatgtccatgagagacgcgtctccgtatcgtataaatatttcattagatgttagacgcttcattaggggtatacttctataaggtttcttaattagtccatcatttgttgcgtcaagaactactatcggatgttgttgggtatctctagtgttacacatggccttactaaagtttgggtaaataactatgatatctctattaattatagatgtatatatttcattcgtcaaggatattagtatcgacttgctatcgtcattaatacgtgtaatgtaatcatataaatcatgcgataaccaaggaaaattcaaatagatgttcatcatataatcatcgctataattcatattaatactttgacattgactaatttgtaatatagcctcgccacgaagaaagctctcgtattcagtttcatcgataaaggataccgttaaatataactggttaccaatagtctcatagtctattaagtggtaagattcgtacaaatacagaatccctaaaatattatctaatgtgggattaatccttaccataactgtataaaatggagacggagtcataactattttaccgtttgtacttactggaatagatgaaggaataatctccggacatgctggtaaagacccaaatgtctgtttgaagaaatccaatgttccaggtcctaatctcttgacaaaaattacaatattagatccggatatcctttgcatcctatttaccaacatatcacgaactatattaagattatctatcatgtctattctcccaccgttatataaatcgcctccgctaagaaacgttagtatatccatacaatggaatacttcatttctaaaatagtattcgttttctaattctttaatgtgaaatcgtatactagaaagggaaaaattatctttgagttttccgttagaaaagaaccacgaaactaatgttctgattgcgtctgattccgtcgctgaattaatagatttacaccaaaaactcatataacttctagatgtagaagcattcgctaaaaaattagtagaatcaaaggatataagtagatgttccaacaagtgagcaattcccaatatttcatctatatcattctcgaatccgaaattagaaattcccaagtagatatcctttttcatccgatcattgatgaaaatacgaactttattcggtaagacgatcatttactaaggagtaaaataggaagtaatgttcgtatatcgttatcatcgtataaattaaaggtgtggtttttgccattaagagacattataattttaccaatattggaattataatataggtgtatttgagcactcgcgacggttgatgcatcggtaaatatagctgtatctaatgttctagtcggtatttcttcatttcgctgtctaatgatagcgttttctctatctgtttctagtacagctgcctgaagtttattggtcggataatatgtaaaataataagaaatacatacgaataacaaaaataaaataagatataataaagatgccatttagagatctaattttgttcaacttgtccaaattcctacttacagaagatgaggaatcgttggagatagtgtcttccttatgtagaggatttgaaatatcttatgatgacttaataacttactttccagataggaaataccataaatatatttctaaggtatttgaacatgtagatttatcggaggaattaagtatggaattccatgatacaactctgcgagatttagtctatcttagattgtacaagtattccaagtgtatacgaccgtgttataaattaggagataatctaaaaggcatagttgttataaaggacaggaatatatatattagagaagcaaatgatgacttgatagaatatctcctcaaggaatacactcctcagatttatacatattctaatgagcacgttcacatagctgattcaaaattaattctttgcggattttctcaagttacatttatggcgtatacaacgtcgcatataacaacaaataaaaaggtagatgttctcgtttccaaaaaatgtatagatgaactagtcgatccaataaattatcaaatacttcaaaatttatttgataaaggaagcggaacaataaacaaaatactcaggaagatattttattcggtaacaggtggccaaactccataggtcgctttttctatttcagattttagaatttccaaattcaccagcgatttatcagttttggtgaaatccaaggatttattaatgtccacaaatgccatttgttttgtctgtggattgtatttgaaaatggaaacgatgtagttagatagatgtgctgcaaagtttcctattagggttccgcgctttacgtcacccagcatacttgaatcaccatcctttaaaaaaaatgataagatatcaacatggagtatatcatactcggattttaattcttctactgcctcactgacattttcacaaatactacaatacggtttaccgaaaataatcagtacgttcttcatttatgggtatcaaaaacttaaaatcgctactgctggaaaacaaatcactgacgatattggatgataatttatacaacgtatacaatggaatatttgtggatacgatgagtatttatatagccgtcgccaattgtgtaagaaacttagaagagttaactacggtattcataaaatacgtaaacggatgggtaaaaaagggagggcatgtaaccctttttatcgatagaggaagtataaaaattaaacaagacgttagagacaagagacgtaaatattctaaattaacaaaggacagaaaaatgctagaattagaaaagtgtacatccgaaatacaaaatgttaccggatttatggaagaagaaataaaggcagaaatgcaattaaaaatcgataaactcgcatttcaaatatatttatctgattctgataacataaaaatatcattgaatgcgatactaacacatttcaacaataatgagaatgttacattattttattgtgatgaacgagacgcagaattcgttatgtgtatagaggctaaaacacatttctctaccacaggagaatggccgttgataataagtaccgatcaggatactatgctatttgcatctgctgataatcatcctaagatgataaaaaacttaactcaactgtttaaatttgttccctcggcagaggataactatttagcaaaattaacggcgttagtgaatggatgtgatttctttcctggactctatggggcatctataacacccaccaacttaaacaaaatacaattgtttagtgattttacaatcgataatatagtcactagtttggcaattaaaaattattatagaaagactgactctaccgtagacgtgcgtaatattgttacgtttataaatgattacgctaatttagacgatgtatactcgtatatttctccttgccaatgcactgttcaagaatttatattttccgcattagatgaaaaatggaacgattttaaatcatcttatttagagagcgtgccgttaccctgccaattaatgtacgcattagaaccacgtaaggagattgatgtttcagaagttaaaactttatcatcttatatagatttcgaaaatactaaatcagatatcgatgttataaaatctatatcctcgattttcggatattctaacgaaaactgtaacacgatagtgttcggcatctataaggataatttactactgagtataaataattcattttactttaacgatagtctgttaataaccaatactaaaagtgataatataataaatataggttactagattaaaaatggtgttccaattagtgtgttctacgtgcggcaaagatatttctcacgaacgatataaattgattatacgaaaaaaatcattaaaggatgtgctcgtcagtgtaaagaacgaatgttgcaggttaaaattatctacacaaatagaacctcaacgtaacttaacagtgcaacctctattggatataaactaatatggatccggttgattttatcaagacatatgcacctagaggttctattatttttattaattatgccatgtcattaactagtcatttgaatccatcgatagaaaaacatgtgggtatttattatggtacgttattatcggaacacttggtagttgaatcgacctatagaaaaggagttagaatagtcccattggatagtttttttgaaggatatcttagtgcaaaagtatacatgttagagaatattcaagttatgaaaatagcagctgatacgtcattaactttactgggtattccatatggatttggtcatgatagaatgtattgttttaaattggtagctgaatgttataaaaatgcaggtgttgatacatcatctaaacgaatattgggcaaagatatttttctgagccaaaacttcacaaatgataatagatggataaagatatatgattctaataatttaacactttggcaaattgattaccttaaagggtgagttaatatgcataactactcctccgttattttttccctcgttctttttcttaacgttgtttgccatcactctcataatgtaaagatattctaaaatggtaaacttttgcatatcggacgcggaaattggtataaatgatgtaattgtattatttcccgtcaatggactagtcacagctccatcagttttatatcctttagagtatttctcactcgtgtctagaattctagagcattccatgatctgtttatcgttgatattggccggaaagatagattttttattttttattatattactattggcaattgtagatataacttctggtaaatatttttctaccttttcaatctcttctattttcaagccggctatatattctgctatattgttgctagtatcaataccttttctggctaagaagtcatatgtggtattcactatatcagttttaactggtagttccattagcctttccacttctgcagaataatcagaaattggttctttaccagaaaatccagctactataataggctcaccgatgatcattggcaaaatcctatattgtaccagattaatgagagcatatttcatttccaataattctgctagttcttgagacattgatttatttgatgaatctagctggttctctagatactctaccatttctgccgcatacaataacttgttagataaaatcagggttatcaaagtgtttagcgtggctagaatagtgggcttgcacgtattaaagaatgcggtagtatgagtaaaccgttttaacgaattatataatctccagaaatctgtggagttacatacgtgggccgaatgacatcgaagattgtccaatatttttaatagctgctccttgtccattatttctatatttgactcgcaacaattgtagataccattaatcaccgattcctttttcgatgctggacaataacacaattgtttagctttggactctatatattcagaattaatagatatatctctcaatacagattgcactatacattttgaaactatatcaaaaattgtagaacgacgctgttctgcagccatttaactttaaataatttacaaaaatttaaaatgagcatccgtataaaaatcgataaactgcgccaaattgtggcatatttttcagagttcagtgaagaagtgtctataaatgtagactcaactgatgagttaatgtatatttttgccgccttgggcggatctgtaaacatttgggccattatacctctcagtgcatcagtgttctaccgcggagccgaaaacattgtgtttaatcttccggtgtctaaggtaaaatcgtgtttgtgtagttttcacaatgatgccatcatagatatagaacctgatctggaaaataatctagtaaaactttctagttatcatgtagtaagtgtcgattgtaacaaggaactgatgcctattaggacagatactactatttgtctaagtatagatcaaaagaaatcttacgtgtttaattttcacaagtatgaagaaaaatgttgtggtagaaccgtcattcatctagaatggttgttgggctttatcaagtgtattagtcagcatcagcatttggctattatgtttaaagatgacaatattattatgaagactcctggtaatactgatgcattttccagggaatattctatgactgaatgttctcaagaactacaaaagttttctttcaaaatagctatctcgtctctcaacaaactacgaggattcaaaaagagagtcaatgtttttgaaactagaatcgtaatggataatgacgataacattctaggaatgttgttttcggacagagttcaatcctttaagattaacatctttatggcgtttttagactaatactttcaatgagataaatatgggtggtggagtaagtgttgcgctccctaaacgggatccgcctccgggagtacccactgatgagatgttactaaacgtggataaaatgcatgacgtgatagctcccgctaagcttttagaatatgtgcatataggaccgctaacaaaagataaagatgataaagtaaagaaaagatatccagagtttagattagtcagcacaggacccggtaatctttcggcattattaagacaatcgtataatggaaccgcacccaactgctgtcgcacttttaatcgtactcattattggaagaaggatggaaagatatcagataagtatgaagatggtgcagaattagaatcgtgttggcccgacgcccacgacactggaaaatgcgatgttgatttattcgactggtgtcagggggatacattcgatagaaacatatgccatcagtggatcggttcagcctttaataggagtgatagaactgtagatggtcaacaatcgctaataaatctgtataataagatgcaaacattatgtagtaaagatgctagtgtaccaatatgcgaatcatttttgcatcatttacgcgcacataatacagaagatagcaaagagatgatcgattatattttaagacaacagtccactgattttaaacagaaatatatgagatgtagttatcccaccagagataagttagaagagtcattaaaatatgcggaacctcgagaatgttgggatccagagtgttcgaatgccaatgtcaatttcttgctaacacgtaattataataatttaggactatgcaatattgtacgatgtaataccagcgtgaacaacttacagatggataaaacttcctcattaagattatcctgtggattaagcaatagtgatagattttctactgttcccgtcaatagagcaaaagtagttcaacataatattaaacactcgttcgacctaaaattgcatttgatcagtttattatctctcttggtaatatggatactaattgtagctatttaaatgggcgccgcagcaagcatacaaacgacggtgaatacactcagcgaacgtatctcgtctaaattagaacaagaagcgaatgctagtgctcaaacaaaatgtaatatagaaattggaaatttttatatccgacaaaaccatggatgtaacctcactgttaaaaatatgtgctccgcggacgcggatgctcagttggatgccgtgttatcagccgctacagaaacatatagtggattaactccggaacaaaaagcatacgtaccagctatgtttactgccgcgttaaacattcaaacgagtgtaaatactgttgttagagattttgaaaattatgtgaaacagacttgtaattctagtgcggtcgtcgataacaaattaaagatacaaaacgtaatcatagatgaatgttacggagccccaggatctccaacaaatttggaatttattaatacaggatctagcaaaggaaattgtgccattaaggcgttgatgcaattgacgactaaggccactactcaaatagcacctagacaagttgctggcgctggagttcaattttatatgatagttatcggtgttataatattggcagcgttgtttatgtactatgccaagcgtatgctattcacatccacccatgataaaatcaaacttattttagccaataaggaaaacgtccattggactacgtacatggacacattctttagaacttctccgatggttattgctaccacggatatgcaaaactgaaaatatattgataatattttaatagattaatatggaagttatcgctgatcgtctagacgatatagtgaaacaaaatatagcggatgaaaaatttgtagattttgttatacacggtctagagcatcaatgtcctgccatacttcgaccattaattaggttgtttattgatatactattatttgttatagtaatttatatttttacggtacatctagtacgtagaaattatcaaatgttgttggcgttggtggcgcaagtcatcacattaactattttttattactttatactataataatactagactgacttctaacaaacatctcgccggccataaataaatgcttgatattaaagtcttctatttctaacactattccatctgtggaaaataatactctgacattatcgctaattgacacatcggtgagtgatatgcctataaagtaataatcttctttgggcacatataccagtgtaccaggttctaacaacctatttactggtgctcccgtagcatactttttctttaccttaagaatatccaccgtttgcatagtcaatagcgacaagtgattttttatcaaccactcgaaaaagtaattggagtgttcatatcctctacgggctattgtctcatgaccgtgtatgaaatttaagtaacacgactgtggtagatttgttctatagagccggttaccgcaaatagatagaactaccaatacatctgtacaaatattaaacatcaattgattaacagaaaaaacaatgttcgttctgggaatagaaaccagatcaaaacaaaattcgttagaatatatgccacgtttatacatggaatataaaataactacagtttgaaaaataacagtattatttaaacatttaacttgcggggttaatctcacaactttactgtttttgaactgttcaaaatatagcatagatccatgagaaatacgtttagccgcctttaatagaggaaatcccaccgcctttctggatctcaccaacgacgatagttctgaccaacaactcaattctgcatcatccacctgttttaacatataataggctggagatagatatccatcattgcaatattccttctcgtaggcacacaatctaatattgataaaatctccattctcttctctgcatttattatcttgtcttggtttaggccttggtctattattaccatcgttgttgaatctactatttcggtcattaaatctttcatttcggcctggtatatttctatcacctcgtttggttggatttttgtctatattatcgtttgtaacatcggtacgggtattcatttatcacaaaaaaaacttctctaaatgagtctactgctagaaaacctcatcgaagaagataccatattttttgcaggaagtatatccgagtatgatgatttacaaatggttattgctggtgcaaaatccaaatttccaagatctatgctttctatttttaatatagtacctagaacgatgtcaaaatatgagttggtgttgattcataatgagaatatcacaggggcaatgtttaccacaatgtataatataagaaacaatttgggtctaggcgatgataaactaactattgaagccattgaaaattatttcttggatcctaacaatgaggttatgccgcttatcattaataatacggatatgactgccgtcattcctaaaaaaagtggtaggagaaagaataagaacatggttatcttccgtcaaggatcatcgcctatcttgtgtattttcgaaactcgtaaaaagattaatatttataaagaaaatatggaatccgcagctactgagtatacacctatcggagacaacaaggctttgatatctaaatatgcgggaattaatatcctgaatgtgtattctccttccacatccatgagattgaatgccatttacggattcaccaataaaaataaactagagaaacttagtactaataaggaactagaatcgtatagctctagccctcttcaagaacccattaggttaaatgattttctgggactattggaatgtgttaaaaagaatattcctctaacagatattccaacaaaggattgattactataaatggagaatgttcctaatgtatactttaatcctgtgtttatagagcccacgtttaaacattctttattaagtgtttataaacacagattaatagttttatttgaagtattcgttgtattcattctaatatatgtattttttagatctgaattaaatatgttcttcatgcctaaacgaaaaatacccgatcctattgatagattacgacgtgctaatctagcgtgtgaagacgataaattaatgatctatggattaccatggatgacaactcaaacatctgcgttatcaataaatagtaaaccgatagtgtataaagattgtgcaaagcttttgcgatcaataaatggatcacaaccagtatctcttaacgatgttcttcgcagatgatgattcattttttaagtatttggctagtcaagatgatgaatcttcattatctgatatattgcaaatcactcaatatctagactttctgttattattattgatccaatcaaaaaataaattagaagctgttggtcattgttatgaatctctttcagaggaatacagacaattgacaaaattcacagactctcaagattttaaaaaactgtttaacaaggtccctattgttacagatggaagggtcaaacttaataagggatatttgttcgactttgtgattagtttgatgcgattcaaaaaagaatcagctctagctaccaccgcaatagatcctgttagatacatagatcctcgtcgcgatatcgcattttctaacgtgatggatatattaaagtcgaataaagtgaacaataattaattctttattgtcatcatgaacggtggacatattcagttgataatcggccccatgttttcaggtaaaagtacagaattaattagacgagttagacgttatcaaatagctcaatataaatgcgtgactataaaatattctaacgataatagatacggaacgggactatggacacatgataagaataattttgaagcattggaagcaactaaactatgcgatgtcatggacgcagttacagatttctctgtgataggtatcgatgaaggacagttctttccagacattgttgaattctgtgagcgtatggcaaacgaaggaaagatagttatagtagccgcactcgatgggacatttcaacgtaaaccgtttaataatatattggatcttattccattatctgaaatggtggtaaaactaactgctgtgtgtatgaaatgctttaaggaggcttccttttccaaacgattgggtacagaaaccgagatagaaataataggaggtaatgatatgtatcaatcaatgtgtagaaagtgttacatcgactcataatattatatttttatctaaaaaactaaaaataaacattgattaaattttaatataatacttaaaaatggatgttgtgtcgttggataaaccgtttatgtattttgaggaaattgataatgaattagattatgaaccagaaagtgcaaatgaggtcgcaaaaaaactgccgtatcaaggacagttaaaactattactaggagaattattttttcttagtaagttacagcgacacggtatattagatggtgccaccgtagtgtatataggatctgctcccggcacacatatacgttatttgagagatcatttctataatttaggagtgatcatcaaatggatgctaattgacggccgtcatcatgatcctattctaaatggattgcgtgatgtgactctagtgactcggttcgttgatgaggaatatctacgatccatcaaaaaacaactgcatccttctaagattattttaatttctgatgtgagatccaaacgaggaggaaatgaacctagtacggcggatttactaagtaattacgctctacaaaatgtcatgattagtattttaaaccccgtggcgtctagtcttaaatggagatgcccgtttccagatcaatggatcaaggacttttatatcccacacggtaataaaatgttacaaccttttgctccttcatattcagctgaaatgagattattaagtatttataccggtgagaacatgagactgactcgagttaccaaatcggacgctgtaaattatgaaaaaaagatgtactaccttaataagatcgtccgtaacaaagtagttgtcaactttgattatcctaatcaggaatatgactattttcacatgtactttatgctgaggaccgtatactgcaataaaacatttcctactactaaagcaaaggtactatttctacaacaatctatatttcgtttcttaaatattccaacaacatcaactgaaaaagttagtcatgaaccaatacaacgtaaaatatctagcaaagattctatgtctaaaaacagaaatagcaagagatccgtacgcggtaataaatagaaacgtactactgagatatactaccgatatagagtataatgatttagttactttaataaccgttagacataaaattgattctatgaaaactgtgtttcaggtatttaacgaatcatccataaattatactccggtcgatgatgattatggagaaccaatcattataacatcgtatcttcaaaaaggtcataacaagtttcctgtaaattttctatacatagatgtggtaatctctgacttatttcctagctttgttagactagatactacagaaactaatatagttaatagtgtactacaaacaggcgatggtaaaaagactcttcgtcttcccaaaatgttagagacggaaatagttgtcaagattctctatcgtcctaatataccattaaaaattgttagatttttccgcaataacatggtaactggaatagagatagccgatagatctgttatttcagtcgctgattaatcaattaatagagataaaataagaatattataataatattataataatatatcttatatcttgtttagaaaaatgctaatattaaaatagctaacgctagtaatccaatcggaagccatttgatatctataatagggtatctaatttcctgattcagatagcggacagctatattctcggtagctactcgtttggaatcacaaacattatttacatctaatttactatctgtaatggaaacgtttcccaatgaaatggtacaatccgatacattgcatcttgatatatttttttttaaagaggctggtaacaacgcatcgcttcgtttacatggctcgtaccaacaataatagggtaatcttgtatctattcctatccgtatgatgcttttatcaggataaatacatttacatcgtatatcgtctttgttagcatcgcagaatgcataaatttgttcgtccgtcatgataaaaatttaaagtgtaaatataactattatttttatagttgtaataaaaagggaaatttgattgtataccttcggttctttaaaagaaactgacttgataaaatggctgtaatctctaaggttacgtatagtctatatgatcaaaaagagattaatgctacagatattatcattagtcatgttaaaaatgacgatgatatcggcactgtcaaagatggtagactaggggctatggatggggcattatgtaagacttgtgggaaaacggaattggaatgttttggacactggggtaaagtaagtatttataaaactcatatagttaagcctgaatttatttcagaaattattcgtttactgaatcatatatgtattcactgcggattattgcgttcacgagaaccgtattccgacgatattaacttaaaagagttatcaggacacgctcttaggagattaaaggataaaatagtatccaagaaaaagtcatgttggaacagcgaatgtatgcaaccgtatcaaaaaattacattttcaaagaaaaaggtttgttttgtcaacaagttggatgatattaatgttcctaattctctcatctatcaaaagttaatttctattcatgaaaagttttggccattattagaaattcatcaatatccagctaacttattttatacagactactttcccatccctccgctgattattagaccggctattagtttttggatagatagtatacccaaagagactaatgaattaacttacttattaggtatgatcgttaagaattgtaacttgaacgctgatgaacaggttatccagaaggcggtaatagaatacgatgatattaaaattatttctaataacactaccagtatcaatttatcatatatcacatccggtaaaaataatatgattagaagttatatcgtcgcccgacgaaaagatcagacggctagatctgtaattggtcccagtacatctatcaccattaatgaggtaggaatgcctgcatatattagaaatacacttacagaaaagatatttgttaatgcctttacagtggataaagttaaacaactattagcatcaaaccaagttaaattttactttaataaacgattaaaccaattaactagaatacgccaaggaaagtttatcaaaaataaaatacatttattgcctggtgattgggtagaagtagctgttcaagaatatacaagtattatttttggaagacagccgtctctacatagatataatgtcattgcttcttctatcagagatacagaaggcgatactatcaaaatatctcccggaattgctaactctcaaaatgctgatttcgacggagatgaagaatggatgatattggagcaaaatcctaaagctgtagttgaacaaagtattcttatgtatccgacgacgttactcaaacacgatattcacggagcccccgtttatggatctattcaagatgaaatcgtggcagcgtattcattgtttaggatacaagatctttgtttagatgaagtattgaacatcttggggaaatatggaagagagttcgatcctaaaggtaaatgtaaattcagcggtaaagatatctatacttacttgataggtgaaaagattaattatccggatctcttaaaggatggtgaaattattgcaaacgacgtagatagtaattttgttgtggctatgaggcatctgtcattggctggactcttatccgatcataagtcgaacgtggaagggatcaactttattattaagtcatcttatgtttttaagagatatctatctatttacggttttggggtgacattcaaagatctgagaccaaattcgacgttcactaataaattggaggccatcaacatagaaaaaatagaacttatcaaagaagcatacgccaaatatctcaaagatgtaagagatgggaaaatagttccattatctaaagctttagaggcggactacgtggaatccatgttatccaacttgacaaatcttaatatcagagagatagaagaacatatgagacaaacgctaatagatgatccagataataatctcctgaaaatggccaaggcgggttataaagtaaatcccacagaactaatgtatattctaggtacttatggacaacagaggatagatggcgaaccagcagagactcgagtattgggtagagtcttaccttactatcttccagactctaaggatccagaaggaagaggttatattcttaattctttaacaaaaggattaacgggttctcaatattacttttcaatgctggttgcaagatctcaatctactgatatcgtctgtgaaacatcacgtacaggaacactagctagaaaaatcattaaaaagatggaggatatggtggtcgatggatacggacaagtagttataggtaatacactcatcaagtacgccgccaattataccaaaattctaggctcggtatgtaaacctgtagatcttatctatccagatgagtccatgacttggtatttggaaatcagtgccttgtggaataaaataaaacagggattcgtttactctcagaaacaaaaacttgcaaagaagacattggcgccgtttaatttcctagtatttgtcaaacccaccactgaggataatgccattaaggttaaggatctgtacgatatgatccacaacgtcatcgatgatgtgagagagaagtacttctttaccgtatctaatatagattttatggagtatatctttttgactcatctgaatccttctagaattagaattacaaaggaaacggctattaccatctttgaaaagttctatgaaaaactcaattatactctaggtggcggaactcctattggaattatttctgcacaggtattgtctgagaagtttacacaacaagccctgtccagttttcacactactgaaaagagtggtgccgtcaaacaaaaacttggtttcaacgagtttaataacttgactaatttgagtaaaaataagaccgaaattatcactctggtatccgatgatatctctaaacttcaatctgttaagattaatttcgaatttgtatgtttgggagaattaaatccagacatcactcttcgaaaagaaacagatagatatgtagtagacataatagtcaatagattatacatcaagagagcagaaattaccgaattagtcgtcgaatatatgattgaacgattcatctcctttagcgtcattgtaaaggaatggggtatggagacattcatcgaggacgaggataatatcagatttactgtctatctaaatttcgttgaaccagaggaattgaatcttagtaagtttatgatggttcttccgggtgctgccaacaagggcaaaattagtaaattcaagattcctatctctgattatacaggttatgacgacttcaatcaaccaaaaaagctcaataagatgactgtagaacttatgaatctaaaagaattggtttcatttgatttggaaaacgttaacgtgtatcctggagtatggaatacatacgatatcttcggcatcgaggccgctcgtggatacttgtgcgaagccatgttaaacacctatggagaaggtttcgattatctgtatcagccttgtgatcttctcgctagtttactatgtgctagttacgaaccagaatcagttaataaattcaagttcggcgcagctagtactcttaagagagctactttcggagacaataaagcattgttaaacgcggctcttcataaaaagtcagaacctattaacgataatagtagctgccacttttttagcaaggtcccaaatataggaactggatattacaaatactttatcgacttgggtcttctcctgagaatggaaaggaaactatctgataagatatcttctcaaaagatcaaggagatggaagaaacagaagacttttaattcttatcaatcacatatttttctatgatctgtcttttaaacgatggattttccacaaatgcacctcttaagtccctcatagaatgatacacgtataaaaaatatagcataggcgacgactccttatttttagacattagatatgccaaaatcatagccccgcttctatttactcccgcagcacaatgaaccaacacaggctcgttttgttgatcacatttagataaaaaggcggtcacgtcgtcaaaatatttactaatgtcggtagttgtatcatctaccaacggtatatgaataatattaatattagagttaggtaatgtatatttatccatcgtcaaatttaaaacatatttgaacttaacttcagatgatggtgcatccatagcatttttataatttcccaaatatacattattggttactcttgtcattatagtgggagatttggctctgtgcatatctccagttgaacgtagtagtaagtatttatacaaacttttcttatccatttataacgtacaaatggataaaactactttatcagtaaacgcgtgtaatttagaatacgttagagaaaaggctatagtaggcgtacaagcagccaagacatcaacacttatattctttgttattatattggcaattagtgcgctattactctggtttcagacgtctgataatccagtctttaatgaattaacaagatatatgcgaattaaaaatacggttaacgattggaaatcattaacggatagcaaaacaaaattagaaagtgatagaggtagacttctagccgctggtaatgatgatatattcgaattcaaatgtgtggatttcggcgcctattttatagctatgcgattggataagaaaacatatctgccgcaagctattaggcgaggtactggagacgcgtggatggttaaaaaggcggcaaaggtcgatccatctgctcaacaattttgtcagtatttgataaaacacaagtctaataatgttattacttgtggtaatgagatgttaaacgaattaggttatagcggttattttatgtcgccgcattggtgttccgatcttagtaatatggaatagtgttagataaatgcggtaacaaatgttcctgtaaggaaccataacagcttagatttaacgttaaagatgagcataaacataataaacaaaattacaatcaaacctataacattaatatcaaacaatccaaaaaatgaaatcagtggagtagtaaacgcgtacataactcctggataacgtttagcagctgccgttcctattctagaccaaaaattcggtttcatgttttcgaaacggtattctgcaacaagtcgaggatcgtgttctacatatttggcggcgttatccagtatctgcctattgatcttcatttcgttttcgattctagccagttcaaaataaaatcccgatgatagacctccagactttataatttcatctacgacgttcagtgccgtagtaactctaataatataggctgataagctaacatcataccctcctgtatatgtgaatatggcatgatctttgtccattactagctcggttttaactttatttcctgtaataatttctctcatctgtaggatatctattttcttgtcatgcattgccttcaagacgggacgaagaaacgtaatatcctcaataacgttatcgttttctacaacaactacatactctacctttttattttctagctcggtaaaaaatttagaatcccatagggctaaatgtctagcgatatttcttttcgtttcttctgtacacatagtgttacaaaaccctgaaaagaagtgagtatacttgtcatcatttctaatgtttcctccagtccactgtataaacacataatccttgtaatgatctggatcatccttgactaccacaacatctcttttttctggtataacttcattgtccttcacatcatcgaacttctgatcattaatatgctcatgaacattaggaaatgtttctgatggaggtctagcaataactggcacaacaataataggagttttcgccgccgccatttagttattgaaattaatcatatacaactctctaatacgagttatattttcgtctatccattgtttcacattgacatattttgacaaaaagatataaaatgcgtattctaatgcttctctgtttaacgaattactaaaatatacaaatacgtcgctgtctggcaataaatgatatcttagaatattgtaacaatttattttgtattgtacatgttcatgatctatgagttcttcttcgaatggcatcggatctccaaatctgaaaacgtataaataggagttagaataataatatttgagagtattggtaatgtacaaactctttagcggtataattagtttttttctctcgatttctatttttagatgtgatggaaaaatggccaattttgtagcattagtatcatgaactctaatcaaaatcttaatatcttcgtcacacgttagctctttgaagtttttaagagatgcatcagttggttctacagatggagtaggtgcaacaattttttgttcgacacatgtatgtactggagccattgtcttaactataatggtgcttgtatcgaaaaactttaatgcagataacggaagctcttcgccgcgactttctacgtcgtagttgggttctaacgccgatctctgaatggatactagttttctaagttctaatgtgattctctgaaaatgtaaatccaattcctccggcattatagatgtgtatacatcggtaaataaaactatagtatccaacgatcccttctcgcaaattctagtcttaaccaagaaatcgtatataactacggagatggcgtatttaagagtggattcttctaccgttttgttcttggatttcatataagaaactataaagtccgcactactgttaagaatgattactaacgcaactatatagtttaaattaagcatcttggaaacataaaataactctgtagacgatatttgactttcgaataagtttgcagacaaacgaagaaagaacagacctctcttaatttcagaagaaaactttttttcgtattcctgacgtctagagtttatatcaataagaaagttaagaattagtcgattaatgttgtatttcattacccaagtttgagatttcataatattatcaaaagacatgataatattaaagataaagcgctgactatgaacaaaatagctatatggttcgctcaagaatatagtcttgttaaacgtggaaacgataactgtatttttaatcacgtccgcggcatctagattaaatataggtatatttatcccacacactctacaatatgccacaccatcttcataataaataaattcgttagcaaaattattaattttagtgaaatagttagtgtcaactttcatagcttccttcaatctaatttgatgctcacacggcgcgaattctactctaacatccattttccatgcctcaggttcatcgatctctataatatctagtttcttgcgtttcacaaacacaggctcgtctctcgcgatgagatctgtatagtaactatgtaaatgataactagatagaaagatgtagctatatagatgacgatcctttaagagaggtatgatgactttaccccaatcagatagactgttgttatggtcttcggaaaaagaatttttataaatttttccagtattttccaaatatacgtacttgacatctaaaaaatccttaatgataataggaatggataatccgtctattttataaagaaatacatatcgcacattatacttttttttggaaatgggaataccgatgtgtctacataaatacgcaaagtctaaatattttttagagaatcttagttggtccaaattcttttccaagtacggtaatagatttttcatattgaacggtatcttcttgatctctggttctaattccgcattaaatgatgaaactaagtcactatttttataactaacgattacatcacctctatcatcatttaccaggatactgatcttcttttgtcgtaaatacatgtctaatgtgttaaaaaaaagatcatacaagttatacatcatttcatctgtagtattcttgtcattgaaggataaactcgtactaatctcttctttaacagtctgttcaaatttatatcctatatacgaaaaaatagcaaccagtgtttgatcatccgcgtcaatattctgtactatcgtagtgtataacaatcttatatcttcttctgtgatagtcgatacgttataaaggttgataacgaaaatatttttatttcgtgaaataaagtcatcgtaggattttggacttatattcgcgtctagtagatatgcttttatttttggaatgatctcaattagaatagtctctttagagtccatttaaagttacaaacaactaggaaattggtttatgatgtataatttttttagtttttatagattctttattctatacttaaaaaatgaaaataaatacaaaggttcttgagggttgtgttaaattgaaagcgagaaataatcataaattatttcattatcgcgatatccgttaagtttgtatcataatggcgtggtcaattacgaataaagcggatactagtagtttcacaaagatggctgaaatcagagctcatctaagaaatagcgctgaaaataaagataaaaacgaggatattttcccggaagatgtaataattccatctactaagcccaaaacaaaacgaaccattacgcctcgtaaaccagcggctactaaaagatcaaccaaaaaggataaagaaaaggaggaagtggaagaagaagtagttatagaggaatatcgtcaaacaactgaagaaaattctccacctccgtcatcatctcctagagtcggcgacattgtagaaagcgtggccgctgtagagctcgatgatagcgacgggggtgatgatgaacctatggtacaagttgaagctggtaaagtaaatcatagtgctagaagcgatctctctgacctaaaggtggctaccgacaatatcgttaaagatcttaagaaaattattactagaatctctgcagtatcgactgttctagaggatgttcaagcagctggtatctctagacaatttacttctatgactaaagctattacaacactatctgatctagtcaccgagggaaaatctaaagttgttcgtaaaaaagttaaaacttgtaagaagtaaatgcgtccacttttttataaagatggtaaactgtttaccgataataattttttaaatcctgtatcagactataatccagcgtatgaggttttgcaacatgttaaaattcctactcatttaacagatgtagtagtatatgaacaaacgtgggaagaggcgttaactagattaatttttgtgggaagtgattcaaaaggacgtagacaatacttttacggaaaaatgcatgtacagaatcgcaacgctaaaagagatcgtatttttgttagagtatataatgttatgaaacgaattaattgttttataaacaaaaatataaagaaatcgtccacagattccaattatcagttggcggtttttatgttaatggaaactatgttttttattagatttggtaaaatgaaatatcttaaggagaatgaaacagtagggttattaacactaaaaaataaacacatagaaataagtcccgatgaaatagttatcaagtttgtaggaaaggacaaagtttcacatgaatttgttgttcataagtctaatagactatataaaccgctattgaaactgacggatgattctagtcccgaagaatttctgttcaacaaactaagtgaacgaaaggtatacgaatgtatcaaacagtttggtattagaatcaaggatctccgaacgtatggagtcaattatacgtttttatataatttttggacaaatgtaaagtccatatctcctcttccgtcaccaaaaaagttaatagcattaactatcaaacaaactgctgaagtggtaggtcatactccatcaatttcaaaaagagcttatatggcaacaactattttagaaatggtaaaggataaaaattttttagacgtggtatctaaaactacgttcgatgaattcctatctatagtcgtagatcacgttaaatcatctacggatggatgatatagatctttacacaaataattacaagaccgataaatggaaatggataagcgtatgaaatctctcgcaatgacagctttcttcggagagctaaacacattagatattatggcattgataatgtctatatttaaacgccatccaaacaataccattttttcagtggatacggatggtcagtttatgattgatttcgaatacgataattataaggcttctctatatttggatctgacccttattccgatatctggagatgaatgcaagactcacgcatcgagtatagccgaacaattggcgtgtgtggatattattaaagaggatattagtgaatatatcaaaactactccccgtcttaaacgttttataaaaaaataccgcaatagatcagacactcgtatcagtcgagatacagaaaagcttaaaatagctctagctaaaggcatagattacgaatatataaaagacacttgttaataagtaaatgaaaaaaaactagtcgtttatgataaaacacgatggatgctaatatagtatcatcttctactattgcgacgtatatagacgcgttagcaaagaatgcttcagaattagaacagaggtctaccgcatacgaaataaataatgaattggaactagtatttattaagccgccattgattactttgacaaatgtagtaaatatctccacgattcaggaatcgtttattcgatttaccgttactaataaggaaggtgtcaaaattagaactaagattccattatctaaggtacatgggctagatgtaaaaaatgtacagttagtagatgctatagataacatagtttgggaaaagaaatcattagtgacggaaaatcgtcttcacaaagaatgcttgttgagactatcgacagaggaacgtcatatatttttggattacaagaaatatggatcctctatccgattagaattagtcaatcttattcaagcaaaaacaaaaaactttacgatagactttaagctaaaatattttctaggatccggtgcccaatctaaaagttctttgttgcacgctattaatcatccaaagtcgaggcctaatacatctctggaaatagaatttacacctagagacaatgaaacagttccatatgatgaactaataaaggaattgacgactctctcgcgtcatatatttatggcttctccagagaatgtaattctttctccgcctattaacgcacctataaagacttttatgttgcctaaacaagatatagtaggtctggatctggaaaatctatatgccgtaactaagactgacggcattcctataactatcagagttacatcaaaagggttgtattgttattttacacatcttggttatattattagatatccagttaagagaataatagattccgacgtagtagtctttggtgaggcagttaaggataagaactggaccgtatatctcattaagctaatagagccaaatgcaatcggtgatagactagaagaaagtaagtatgtcgaatctaaactagtggatatttgtgatcggatagtattcaagtcaaagaaatatgaaggtccgtttactacaactagtgaagtcgtcgatatgttatctacatatttaccaaagcaaccagaaggtgttattctgttctattcaaagggacctaaatctaacattgattttaaaatcaaaaaggagaatactatagaccaaactacaaatgtagtatttaggtacatgtccagtgaaccaattatctttggagagtcgtctatctttatagagtataagaaatttaccaacgataaaggctttcctaaagaatatggttctggtaagattgtgttatacaacggcgttaattatctaaataatatctattgtttggaatatattaatacacataatgaagtgggtattaagtccgtggttgtacctattaagtttatagcagaattcttagtcaatggagaaatacttaaacctagaatcgataaaaccatgaaatatattaactcagaagactattatggaaatcaacataatatcatagtcgaacatttaagagatcaaagcatcaaaataggagatgtctttaacgaggataaactatcggatgtgggacatcaatacgccaataatgataaatttagattaaatccagaagttagttattttacgaataaacgaactagaggaccgttgggaattttatcaaactacgtcaagactcttcttatttctatgtattgttccaaaacatttttagacgattccaacaaacgaaaggtattggcgattgattttggaaacggtgctgacctggaaaaatacttttatggagagattgcgttattggtagcgacggatccggatgctgatgctatagctagaggaaatgaaagatacaacaaattaaattctggaattaaaaccaagtactacaaatttgactacattcaggaaactattcgatccgatacatttgtctctagtgtcagagaagtattctattttggaaagtttaatatcattgactggcagttcgctattcattattcgtttcatccgagacattatgctacagtcatgaataacttatccgaactaactgcttctgggggcaaggtattgattactaccatggatggagacaaattatcaaaattaaccgataaaaagacttttataattcataagaatctacctagtagcgaaaactatatgtctgtagaaaaaatagctgatgatagaatattggtatataatccatcaacaatgtctacaccaatgactgaatacattatcaaaaagaatgatatagtcagagtgtttaacgaatacggatttgttcttgtagacaacattgatttcgctacaattattgaacgaagtaaaaagtttattaatggcgcatctacaatggaagatagaccgtctacaagaaactttttcgaactaaatagaggagccattaaatgtgaaggtttagatgtcgaagacttacttagttactatgttgtttatgtcttttctaagcggtaaataataatatggtatgggttctgatatccccgttctaaatgcattaaataattccaatagagcgatttttgttcctataggaccttccaactgtggatactctgtattgttaatagatatattaatacttttgtcgggtaacagaggttctacgtcttctaaaaataaaagtttgataacatctgacctgttcataaataaaaacttggcaattctatatatactcttattatcaaatctagccgctgtcttatagatgtgagctactgtaggtgtaccatttgattttctttctaatactatatatttctctcgaagaagttcttgcacatcatctgggaataaaatactactgttgagtaaatcagttattttttttatatcgatattgatggacatttttatagttaaggataataagtatcccaaagtcgataacgacgataacgaagtatttatacttttaggaaatcacaatgactttattagatcaaaattaacaaaattaaaggagcatgtatttttttctgaatatattgtgactccagataaatatggatctttatgcgtcgaattaaatggatctagttttcagcacggtggtagatatatagaggtggaggaatttatagatgctggaagacaagttagatggtgttctacatccaatcatatatctgaagatatacccgaagatatacacactgataaatttgtcatttatgatatttatacgtttgattcgttcaagaataaacgattggtatttgtacaggtacctccatcattaggagatgatagctatttgactaatccgttcttgtctccgtattatcgtaattcagtagcccggcaaatggtcaataatatgatttttaatcaagattcatttttaaaatatttattagaacatctgattagaagccactatagagtttctaaacatataacaatagttagatacaaggataccgaagaattaaatctaacaagaatatgttataatagagataagtttaaggcgtttgtattcgcttggtttaacggcgtttcggaaaatgaaaaggtactagatacgtataaaaaggtatctgatttgatataatgaactcggtaactgtgtcgcacgcaccatatactattacttatcacgatgattgggaacccgtaatgaatcaattagtagagttttataacgaagtatccagctggctgctacgagatgagacgtcgcctattcctgataagttctttatacagttgaaacaaccgcttagaaataagcgagtatgtgtgtgtggtatagatccgtacccgaaagatggaactggtgtaccgttcgaatcaccaaattttacaaaaaaatcaattaaggagatagcttcatccatatctagattaacaggagtaattgattataaaggttataaccttaatataatagacggggttataccctggaattattacttaagttgtaaattaggagaaacaaaaagtcacgcgatttactgggataagatttctaagttactgctgcagcatataactaaacacgttagtgttctttattgtttgggtaaaacagatttctcgaatatacgggcaaagttagaatccccggtaactaccatagtgggatatcatccagcggctagagaccaccaattcgagaaagatcgatcatttgaaattatcaacgttttactggaattagataacaaggcacctataaattgggctcaagggtttatttattaatgctttagtgaaattttaacttgtgttctaaatggatgcggatattagaggtaatgatattatctttgttcttaagactataggtgtcccatcggcatgtagacaaaatgaagatccgagattcgtagaagcatttaaatgcgacgagttagaaagatatattgagaataatccagaatgtacactattcgaaagtcttagggatgaggaagcatactctatagtcagaattttcatggatgtagatttagacgcatgtctagacgaaatagattatttaacggctatacaagattttattatcgaggtgtcaaactgtgtagctagattcgcgtttacagaatgcggtgccattcatgaaaatgtaataaaatccatgagatctaatttttcattaactaagtctacaaatagagataaaacaagctttcatatcatctttttagatacgtataccactatggatacattgatagctatgaaacgaacacttttagaattgagtagatcatctgaaaatccactaaccagatcgatagacactgccgtatataggagaaaaacaactcttcgggttgtaggtactaggaaaaatccaaattgtgacactattcatgtaatgcaaccaccgcatgataatatagaagattacctattcacttacgtggatatgaacagcaatagttattacttttctctacaacgacgattggaggatttagtttcagataagttatgggaaccatggtttatttcattcgaagacgctataaaaagagtttcaaaaatattagttaattctataataaactttaacgatcttgatgaaaataattttactacggtaccactagtcatagattacgtaacaccttgtgcattatgtaaaaaacgatcgcataaacatccgcatcaactatcgttggaaaatggtgctattagaatttacaaaactggtaatccgcatagttgtaaagttaaaattgttccattggatggcaacaaactgtttaatatcgcacaaagaattttagacactaactctgttttattaaccgaacgaggagatcatatagtttggattaataattcatggaaatttaatagcgaagaaccgttgataacaaaactaattctgtcaataagacatcaactacctaaggaatattcaagcgaattactctgcccgaggaaacgaaagactgtagaagctaacatacgagacatgttagtagattcagtagagaccgatacctatccggataaacttccgtttaaaaatggtgtattggacctggtagacggaatgttttactctggagatgatgctaaaaaatatacatgtactgtatcaaccggatttaaatttgacgatacaaagttcgtcgaagacagtcctgaaatggaagagttaatgaatatcattaacgatatccaaccattaacggatgaaaataagaaaaatagagagttgtacgaaaaaactttatctagttgtttatgcggtgctaccaaaggatgtttaacattcttttttggagaaactgcaactggaaagtcgacaaccaaacgtttgttaaagtctgctatcggtgacctgtttgttgagacgggtcaaacaattttaacagatgtattggataaaggacctaatccatttatcgctaacatgcacttgaaaagatctgtattctgtagcgaactacctgattttgcatgtagtggatcaaagaaaattagatctgacaatattaaaaagttgacagaaccttgtgtcattggaagaccgtgtttctccaataaaattaataatagaaaccatgcgacaataattattgataccaattacaaacctgtatttgataggatagataacgcattaatgagaagaattgccgtcgtgcgattcagaacacacttttctcagccttctggtagagaggctgctgaaaataatgacgcgtacgataaagtcaaactattagacgagggattagatggtaaaatacagaataatagatatagattcgcatttctatacttgttggttaaatggtacaaaaaatatcatattcctattatgaaactatatcctacaccggaagaaattccggactttgcattctatctcaaaataggtactctgttggtctctagctctgtaaagcatattccattaatgacggacctctccaaaaaggggtatatattgtacgataatgtggtcactcttccgttgactactttccaacagaaaatatccaagtattttaattctagactatttggacacgatatagagagcttcatcaatagacataagaaatttgccaatgttagcgatgaatatctgcaatatatattcatagaggatatttcatctccgtaaatatatactcgtatatttatagaagatatcacatatctaaatgaataccggaatcatagatttatttgataatcatgttgatagtataccgactatattacctcatcagttagctactttagattatctagttagaactatcatagatgagaacagaagcgtgttattgttccatattatgggatcgggtaaaacaataatcgctttgttgttcgccttggtagcttccagatttaaaaaggtttacattctagtgccgaacatcaacatcttaaaaattttcaattataatatgggtgtagctatgaacttgtttaatgacgaattcatagctgagaatatctttattcattccacaacaagtttttattctcttaattataacgataacgtcattaattataacggattatctcgctacaataactctatttttatcgttgatgaggcacacaatatctttgggaataatactggagaacttatgaccgtgataaaaaataaaaacaagattccttttctactattgtctggatctcccattactaacacacctaatactctgggtcatattatagatttaatgtccgaagagacgatagattttggtgagattattagtcgtggtaagaaagtaattcagacacttcttaacgaacgcggcgtgaatgtgctcaaggatttgcttaaaggaagaatatcatattacgaaatgccggataacgatctaccaacgataagatatcacggacgtaagtttctagatactagagtagtatattgtcacatgtctaaacttcaagagagagattatatgattactagacgacagctatgttatcatgaaatgtttgataaaaatatgtataacgtgtcaatggcagtattgggacaacttaatctgatgaataatttagatacgttatttcaggaacaggataaggaattgtacccaaatctgaaaataaataatggcgtgttatacggagaagaattggtaacgttaaacattagttccaaatttaagtactttatcaatcggatacagacactcaacggaaaacattttatatacttttctaattctacatatggcggattggtaattaaatatatcatgctcagtaatggatattctgaatataatggttctcagggaactaatccacatatgataaacggcaaaccaaaaacatttgctatcgttactagtaaaatgaaatcgtctttagaggatctattagatgtgtataattctcctgaaaacgatgatggtagtcaattgatgtttttattttcgtcaaacattatgtccgaatcctatactctgaaagaggtaaggcatatttggtttatgactatcccagatactttttctcaatacaaccaaattcttggacgatctattagaaaattctcttacgccgatatttctgaaccagttaatgtatatcttttagccgccgtatattccgatttcaatgacgaagtgacgtcattaaacgattacacacaggatgaattgattaatgttttaccatttgacatcaaaaagctgttgtatctaaaatttaagacgaaagaaacgaatagaatatactctattcttcaagagatgtctgaaatgtattctcttccaccacatccatcaattgtaaaagttttattgggagaattgatcagacaatttttttataataattctcgtattaagtataacgactccaagttacttaaaatggttacatcagttataaaaaataaagaagacgctaggaattacatagatgatattgtaaacggtcacttctttgtatcgaataaagtatttgataaatctcttttatacaaatacgaaaacgatattattacagtaccgtttagactttcctacgaaccatttgtttggggagttaactttcgtaaagaatataacgtggtatcttctccataaaactgatgagatatataaagaaataaatgtcgagctttgttaccaatggataccttccagttacattggaaccacatgagctaacgttagacataaaaactaatattaggaatgccgtatataagacgtatctccatagagaaattagtggtaaaatggccaagaaaatagaaattcgtgaagacgtggaattacctctcggtgaaatagttaataattctgtagttataaacgttccgtgtgtaataacctacgcgtattatcacgttggggatatagtcagaggaacattaaacatcgaagatgaatcaaatgtaactattcaatgtggagatttaatctgtaaactaagtagagattcgggtactgtatcatttagcgattcaaagtactgcttttttcgaaatggtaatgcgtatgataacggcagcgaagtctccgccgttctaatggaggctcaacaaggtatcgaatctagttttgtttttctcgcgaatatcgtcgactcataagaaagagaatagcggtaagtataaacacgaatactatggcaataattgcgaatgttttattcccttcgatatatttttgataatatgaaaaacatgcctctctcaaatcagacaaccatttcataaaatagttctctcgcactggcgaagtggttacagctcgtataatctccccagaataatatatttctgtgtcgtcattcaatttatacggatttctatagttctctgttatataatgcggttttccctcatgattagacgacgacaatagtgttctaaatttagatagttgatcagaatgaatgtttattggcgttggaaaaattatccatgccgcgtctgcagagtggttgatagttgttcctagatatgtaaaataatccaacgtgctaggcaacaaattgtctagataaaatactgaatcaaacggcgtagacgtattagcgtatctaatggaatccaattgattgactatcttttgaaaatatacatttttatgatccgatacttgtaagaatatagcaacaatgataattccatcatcgtgtttttttgcctcttcataagaactatattttttcttattccaatgaacaagattaatctctccagagtatttgtatacatctatcaagtgattggatccataatcgtcttcctttccccaatatatatgtagtgatgataacacatattcattggggagaaaccctccacttatgtacccgcctttaaaattaatccttactagttttccagtattctgaatagtggttggttttgactcattataatgtatgtctaacggcttcaatcgcacgttagaaatcgcttttttagtttctatattaataggagatagttgttgaggcatagtaaaaatgaaatgataactgtttagaaatagctcttagtatgggaattacaatggatgaggaagtgatatttgaaactcctagagaattaatatctattaaacgaataaaagatattccaagatcaaaagacacgcacgtgtttgctgcgtgtataacaagtgacggatatccgttaataggagctagaagaacttcattcgccttccaggcgatattatctcaacaaaattcagattctatctttagagtatccactaaactattacggtttatgtactacaatgaactaagagaaatctttagacggttgagaaaaggttctatcaacaatatcgatcctcacttcgaagagttaatattattgggtggtaaactagataaaaaggaatctattaaagattgtttaaaaagagaattaaaagaggaaagtgatgaacgtataacggtaaaagaattcggaaatgtaattctaaaacttacgacacgtgataaattatttaataaagtgtatataggttattgtatggcatgttttattaatcaatcgttggaggatttatcgcatactagtatttacaatgtagaaattagaaagattaaatccttaaatgattgtattaacgatgataaatacgaatatctgtcttatatttataatatgctagttaatagtaaatgaccttttacagatctagtataattagtcagattattaagtataatagacgactagctaagtctattatttgcgaagatgactctcaaattattacacttacggcattcgttaaccaatgcctatggtgtcataaacgagtatccgtatccgctattttattgactaatgataacaaaatattagtgtgtaacagacgagatagttttctctattctgaaataattagaactagaaacatgtttagaaaaaaacgattatttctgaattattctaattatttgaacaaacaggaaagaagtatactatcgtcatttttttctctagatccagctactactgataatgatagaatagacgctatttatccgggtggtatacccaaaaggggcgagaacgttctagagtgtttatccagggaaatcaaagaagaagttaatatagacaattcttttgtattcatagacactcgtttttttattcatggtatcatagaagataccattattaacaaattttttgaggtaattttctttgtcggaagaatatctctaacgagtgatcaaattattgatacctttaaaagtaatcatgaaatcaaggatctgatatttttagatccgaattcgggtaatggactacaatatgaaattgcaaaatatgctctagatactgcaaaacttaaatgttacggccatagaggatgttattacgaatcattaaaaaaattaacggatggatttattgattagaaaatataaattaatttaccatcgtgtatttttataacaggattgtccggcatatcatgtagatagttaccgtctacatcgtatactcgaccatctacgcctttaaatcctctatttattgacattaatctactagaattggaataccaaatattagtaccctcaattagtttattggtaatattttttttagacgatagatcgattgctcttgaaaccaatgttttccaaccggactcattgttgatcggtgagaagtctttttcattagcatgaatccattccaatgatgtatgtttaaacactctaaacaattgaacaaattcttttgatttgctttgaatgatttcaaataggtcttcgtctacagtaggcatactattagataatctagccattataaagtgcacgtttacatatctacgttctggaggagtaagaacgtgactattgagacgaatggctcttcctactatctgacgaagagacgcctcgttccatgtcatatctagaataaagatatcattgattgagaagaaactaataccctcacctccactagaagagaatacacatgttttaatgcattctccgttagtgtttgattcttggttaaactcagccaccgccttgattctagtatctttcgttctagatgagaactctatattagagataccgaatactttgaaatatagtaataagatttctattcctgactgattaacaaatggttcaaagactagacatttaccatgtgatgctaatattcccaaacatacatctatgaatttgacgcttttctcttttaattcagtaaatagagagatatccgccgcactagcatcccctcccaatagttctccccttttaaaggtatctaatgcggatttagaaaattctctatctcttaatgaatttttaaaatcattatatagggttgctatctcttgcgcgtattcgccgggatcacgattttgtctttcaggaaagctatcgaacgtaaatgtggtagccatacgtctcagaattctaaatgatgatataccagtttttatttctacgagtttagccttttgataaatctcttcttgcttttttgacatattaacgtatcgcattaatactgttttcttagcgaatgatgcagacccttctacatcatcaaaaatagaaaactcgttattaactatatacgaacatagtcctcctagtttggatactaattctttttcatcgactagacgtttgttctcaaatagcgattggtgttgtaaggatcctggtcgcagtaagttaaccaacatggtaaattcttgcacactattgacgacaggtgtagccgataaacaaatcatcttatggttttttaacgcgatggtcttagataaaaaattatatactgaacgagtaggacggatcttaccatcttctttgattaatgatttagaaatgaagttatgacattcatcaatgatgacgcatattctactcttggaattaatagttttgatattagtaaaaaatttatttctaaaattttgatcatcgtaattaataaaaatacaatccttcgttatctctggagcgtatctgagtatagtgttcatccaaggatcttctatcaaagcttttttcaccaataagataatagcccaattcgtataaatatccttaagatgtttgagaatatatacagtagtcattgttttaccgacacctgtttcatggaacaataaaagagaatgcatactgtctaatcctaagaaaactcttgctacaaaatgttgataatctttgaggcgtactatgtctgaccccatcatttcaacgggcatattagtagttctacgtaaggcataatcgatataggccgcgtgtgatttactcatttatgagtgataagtaataactatgttttaaaatcacagcagtagtttaactagtcttctctgatgtttgttttcgatactttttgaatcagaagtcatactagaataaagcagcgagtgaacgtaatagagagcttcgtacactctattcgaaaactctaaaaacttattaatgaattccgtatccactggatcgtttaaaatactaaattgaacactgttcacatccttccaagaagaagacttagtgacggacttaacatgagacataaataaatccaaattttttttacaaacatcactagccaccataatggcggtatctttcaaccagctatcgcttacgcattttagcagtctaacatttttaaagagactacaatatattctcatagtatcgattacacctctaccgaatagagtgggaagtttaataatacaatatttttcgtttacaaaatcaaataatggtcgaaacacgtcaaaggttaacattttataatcgctaatgtataaattgttttcagttagatgattattagatttaatggcgtctcgttcacgtttgaacagtttattgcgtgcgctgaggtcggcaactacggcgtccgctttagtactcctaccgtaatactttacgctattaatctttaaaatttcatagactttatctagatcgctttctggtaacatgatatcatgtgtaaaaagttttaacatgtctgttggcattctatttagatcattaactctagaaatctgaagaaagtaattagctccgtattccagactaggtaatgggcttttacctaaagacaagttaagttctggcaatgtttcataaaatggaagaaggacatgcgtcccctcccgaatattttttacaatttcatccatttacaactctatagtttgttttcattattattagttattatctcccataatcttggtaatacttaccccttgatcgtaagataccttatacaggtcattacatacaactaccaattgtttttgtacataatagattggatggttgacatccatggtggaataaactactcgaacagatagtttatctttccccctagatacattggccgtaatagttgtcggtctaaagaatatctttggtgtaaagttaaaagttagggttcttgttccattattgctttttgtcagtagttcattataaattctcgagatgggtccgttctctgaatatagaacatcatttccaaatctaacttctagtctagaaataatatcggtcttattcttaaaatcgattcctttgatgaagggatcgttaataaacaaatccttggcctttgattcggctgatctattatctccgttatagacgttacgttgactggtccaaagacttacaggaatagatgtatcgatgatgttgatagtatgtgatatgtgagcaaagactgttctcttggtggcgtcactatatgttccagtaatggcggaaaactttttagaaatgttatatataaaagaattttttctggttccaaacattagcagattagtatgaagataaacactcatattatcaggaacattatcaatttttacatacacatcagcatcttgaatagaaacaataccatcttctggaacctcgacgatctcggcagactccggataaccagtcggtggaccatcgctaacaataactagatcatccaacaatctactcacatatgcgtcaatataatctttttcatcttgtgagtaccctggatacgaaataaatttattatccgtatttccataataaggtttagtataaacagagagagatgttgctgcatgaacttcggttactgtcgccgttggttggtttatttgacctattactctcctaggtttctctataaatgatggtttaatttgtacattcttaaccatatatccaataaagctcaattcaggtacataaacaaattctttgttgaacgtttcaaagtcgaacgaagagtcacgaataacaatatcggatactggattgaaggtcaccgttacggtaatttttgaatcggatagtttaagactactgaatgtatcttccacatcaaacggagttttaatataaacgtatactgtagatggttctttgatagtgtcattaggagttaggccaatagaaatatcattaagttcactagaatatccagaatgtttcaaagcaattgtgttgttgatacaattattatataattcttcgccctcaatttcccaaataacaccgttacacgaagagatagatacgttattaatacatttatatccaacatatggcacgtaaccgaatcttcctattcctttaacttctggaagttccaaactcagaaccaaatgattaagcgcagtaatgtactgatccctaatctcgaagctagcaatagcctgattgtcgggaccgtcgtttgtcataactccggatagagaaatatagtgcggcatatacaaagttggaatttgactatcgaccgcgaagacattagaccgtttaatagagtcatccccaccgatcaaagaattaatgatagtattattcattttctatttaaaatggaaaaagcttacaataaactccgtagagaaatatctataatttgtgagttttccttaaagtaacaacttccgtaaactccgtctttatctcttagtaagtttattgtatttatgaccttttccttatcttcatagaatactaaaggcaacaaagaaatttttggttcttctctaagagctacgtgagacttaaccatagaagccaacgaatccctacatattttagaacagaaataccccacttcaccaccattgtatgtctcaatactaataggtctaaaaaccaaatcttgattacaaaaccaacacttatcaattacactatttgtcttaatagacacatctgccatagatttataatactttggtagtatacaagcgagtgcttcttctttagcgggcttaaagactgctttaggtgccgaaataaccacatctggaaggcttactcgcttagccatttaattacggaactatttttttatacgtctaatgagcaagtagaaaacctctcgtctacaaaaacatactcgtgtccataatcctctaccatagtaacacgttttttagatcgcatatgcgctaaaaaattttcccatactaattggttactattatttttcgtataattcttgaccgtttgaggttttagatttttagttacggaagtgatatcgaatattttatccaaaaagaatgagtaattaattgtcttagaaggagtgttttcttggcaaaagaataccaagtgcttaaatatttctactacttcattaatcttttctgtactcagattcagtttctcatcttttacttgattgattatttcaaagactaacttataatcctttttatttattctctcgttagctttaagaaaaccagatacaaaatttgcatctacatcatccgtggatatttgatttttttccatgatatccaagagttccgagataatttctccagaacattgatgagacaataatctccgcaatacatttctcaaatgaataagtttattagacacgtggaagttcgactttttttgtatctttgtacatttttgaaatacagactcgcaaaaaatacaatattcatatccttgttcagatactataccgttgtgtctacaaccgctacataatcgtagattcatgttaacactctacgtatctcgtcgtccaatattttatataaaaacattttatttctagacgttgccagaaaatcctgtaatacttttagtttttggggttgtgaataaagtatcgccctaatattgttacagtcttccgccaatatagtagttaaattatccgcacatgcagaagaacaccgcttaggtggattcagtacaatgttatatttttcgtaccaactcatttaaatatcataatctaaaatagttctgtaatatgcctagcgctaatatattgatcataatcctgtgcataaattaagatacaacaatgtcttgaaatcatcgacatggcttcttccatagttagaagatcgtcgtcaaagttagcaacgtgattcatcaacatttgctgttttgaggcagcaaatactgaaccatcgccattcaaccattcataaaaaccatcgtctgaatccattgataatttcttgtactggtttttgagagctctcatcaatctagcatttctagctcccggattgaaaacagaaagaggatcgtacatccagggtccattttctgtaaatagaatcgtataatgtcccttcaagaagatatcagacgatccacaatcaaagaattggtctccgagtttataacagactgcggactttaacctatacatgataccgtttagcatgatttctggcgatacgtcaattggagtatcatctattagagatctaaagccggtgtaacattctccaccaaacatattcttattctggcgtcgttctacataaaacatcattgctccattaacgataacaggggaatgaacagcactacccatcacattagttcccaatggatcaatgtgtgtaactccagaacatcttccatagcctatgttaggaggagcgaacaccactcttccactattgccatcgaatgccatagaataaatatccttggaattgatagaaatcggactgtcggatgttgtgatcatcttcataggattaacaacgatgtatggcgccgcctgaagtttcatatcgtaactgatgccgttcataggtctagccacagaaaccaacgtaggtctaaatccaactatagacaaaatagaagctaatatctgttcctcatcggtcataacttgagagcatccagtatgaataatcttcattagatggggatctaccgcatcatcatcgttacaataaaaaattcccattctaatgttcataattgcttttctaatcatggtatgcatgtttgctctctgaatctctgtggaaattagatctgatacacctgtaatcactatcggattatcctccgtaagacgattaaccaacaacatataattataagactttactcttctaaattcataaagttgctggattagactatatgtgtctccatgtacatacgcgttctcgagcgctggaagtttaataccgaatagtgccatcagaataggatgaatgtagtaattagtttctggttttctataaataaaagacaaatcttgtgaactagacatatcggtaaaatgcatggattggaatcgtgtagtcgacagaagaatatgatgattagatggagagtatattttatctaactctttgagttggtcaccgattctaggactagctcgagaatgaataagtactaaaggatgagtacatttcacagaaacactagcattgttcaacgtgctctttacatgggtaaggagttgaaatagctcgtttctatttgttctgacaatatttagtttattcataatgttaagcatatcctgaatagtaaagttagatgtgtcatacttgttagtagttagatatttagcaattgcattcccatcatttctcaatctcgtactccaatcatgcgtggatgctacttcgtcgatggaaaccatacaatcctttttgataggctgttgagattgattatttcctgcacgtttaggtttggtacgttgatttctagctcctgcggatataaagtcatcgtctacaatctgggataatgaattgcatacactacaagacaaagatttatcagaagtgtgtatatgatcttcatctaccaaagaaagagtttgattaatataactagattttagtcctgcgttagatgttaaaaacccatcactattgagcacggcttccattatttatattcgtagtttttactcgaaagcgtgattttaatatccaatcttattacttttggaatcgttcaaaacctttgactagttgtaaaatttgatctattgccctacgtgtatattcccttgcatcatatacattcgttaccagatcagttgtttcggcttgaagttgatgcatatctttttcaacactcgacatgagatccttaagggacatatcgtctagattttgttgtgatattgctcctggatttggattttgttgtgctgttgtacatactgtaccaccagtaggtgtaggagtacatacagtggccacaataggaggttgaggaggtgtaaccgttggagtagtacaagaaatacttccatccgattgttgtgtacatgtggttgttggcaacgtctgagaaggttgggtagatggcggtgttgtcgtcttttgatctttattaaatttagagataatatcctgaacagcattgctcggcgtcaacgctggaaggagtgaattcgactgtgtatcggtatctgacgacaaccaatcaaaaagattagacatatccgatgatgtattagtttgttgtcgtggttttggtgtaggagcagtactactaggtagaagaatagcagacggtgtagatgtcggaaccggctgtggagttatatgaattgttggttgtagcggttggataggccgtctattggcgaccatcatattatctctagctagttgttctcgcaactgtctttgataatacgactcttgagactttagtcctatttcaatcgcttcatcctttttcgtatccggatccttttcttcagaataatagattgatgactttggtgtagaggcttctaccagcccctgtgagaacttgttaaagaagtccatttaaggctttaaaattgaattgcgattataagattaaatggcagacacagacgatattatcgactatgaatccgatgatctcaccgaatacgaggatgatgacgaagaggaagaagatggagagtcactagaaactagtgatatagatcccaaatcttcttataagattgtagaatccgcatccactcatatagaagatgcgcattccaatcttaaacatatgggaaatcatatatctgctcttaaacgacgctatactagacgtataagtctatttgaaatagcgggtataatagcagaaagctataacttgcttcaacgaggaagattacctctagtttcagaattttctgacgaaacgatgaagcaaaatatgctacatgtaattatacaagagatagaggagggttcttgtcctatagtcatcgaaaagaacggagaattgttgtcagtaaacgattttgacaaagatggtctaaaattccatctagactatattatcaaaatttggaaacttcaaaaacgatattagaatttatacgaatatcgttctctaaatgtaacaatcaagtctcgcatgttcagcagtttattgtcgtactttatatcgtgttcattaacgatattttgcaaaatagtaatgattctatcttccttcgatagatattcttcagagattattgtcttatattctttcttgttatccgatatgaatttgataagactttgaacattattaattcccgtctgtttaattttttctacggatattttagttttggcagattctatcgtatctgttaatagacacccaacatcaacattcgacgtcaattgtctataaatcaacgtataaattttagaaataacattagcaaattgttgggcgttgatgtcgttattctgaaacagtatgattttaggtagcattttcttaacaaagagaacgtatttattattactcagttgaacagatgatatatccagattactaacacatctgattccgtataccaaactttcagaagaaatggtatacaattgtttgtattcattcaatgtctctttttcagaaattagtttagaatcgaatactgcaataattttcaagagatagttttcatcagataagattttatttagtgtagatatgataaaactattgttttgttggagaacttgatacgccgcattctctgtagtcgacgctctcaaatgggaaacaatctccattatttttttggagtcggatacgatatcttcggtatcttgacgcaatctagtatacatagagttaagagaaattatagtttgtacattgagcaacatgtctctaaatgcgactacaaatttttccttttccacatcatctagtttattatataccgatttcacaacagcaccagatttaaggaaccagaatgaaaaactctgataactacaatatttcatcatagttacgattttatcatcttctatagttggtgtgatagcgcatacctttttctccaagactggaaccaatgtcataaaaatgtttaaatcaaaatccatatcaacatctgatgcgctaagaccagtctcgcgctcaagattatctttactaatggtgacgaactcatcgtatagaactctaagtttgtccattatttatttacagatttagttgtttaatttatttgtgctcttccagagttgggatagtatttttctaacgtcggtattatattattaggatctacgttcatatgtatcataatattaatcatccaggttttgataaatctatctttagcttctgaaataacgtatttaaacaaaggagaaaaatatttagctacagcatcagacgcaataacattttttgtaaatgtaacgtatttagacgacagatcttcgttaaaaagttttccatctatgtagaatccatctgttgttaacaccattcccgcgtcagattgaataggagtttgaatagtttgttttggaaatagatccttcaataacttatagttgggtgggaaaaaatcgattttatcactagactctttcttttttactatcattacctcatgaactatttcttgaatgagtatatgtattttctttcctatatcagacgcgttcattggaaaatataccatgtcgttaactataagaatatttttatcctcgtttacaaactgaataatatcagatgtagttcgtaaacgaactatatcatcaccggcacaacatctaactatatgatatccactagtttcctttagccgtttattatcttgttccatattagcagtcattccatcatttaagaaggtgtcaaagataatagggagaaatgacattttggattctgttacgactttaccaaaattaaggatatacggacttattatctttttttcaacgtcgatttgatgaacacacgatgaaaatgtacttcgatgagattgatcatgaagaaaacaacaagggatacaatatttccgcatatcatgaaatatattaagaaatcccactttattatatttccccaaaggatccatgcacgtaaacattataccgttatcattaataaatacttctttctcatcggatctgtaaaagttgttactgatttttttcattccaggatctagataattaataatgatgggttttctattcttattctttgtattttgacatatcctagaccagtaaacagtttccactttggtaaaatcagcagacttttgaacgctattaaacatggcattaatggcaataactaaaaatgtaaaatatttttctatgttaggaatatggtttttcactttaatagatatatgttttttggccaaaatgatagatatttttttatccgaggatagtaaaatattattagtcgccgtctctataaaaatgaagctagtctcgatatccaattttattctagaattgataggagtcgccaaatgtaccttatacgttatatctcccttaatgcgttccatttgtgtgtctatatcggatacaagatcagtaaatagtttcacattattaatcatcacagtatcgccgtcgctagataatgctaatgtgccatccaagtcccaaatggagagatttaactgttcatcgtttagaataaaatgattaccggtcatattaataaagtgttcatcgtatctagataacgccgacttataattaatgtccaagtcttgaactcgctgaataatcttttttaacccagttagttttagattggtacgaaatatattgttaaactttgattctacagtaatgtccaaatcgagtcgtggaaatacttccatcaacattgtttcaaacttgataatattattatctacatcttcatacgatccaaattccggaatagatgtatcacatgctcttgccacccagataaccaaaaagtcacacgctccaggatatacattgtataaaaagctatcgtttttaagtagggtttttttctgcgtatatacgaagggattaaaaatagtattatcaacgtaactatattccaaattattcttatgagaatagataataatatcgtccttaatatctaacaaatttcctaaatatccctttaattgagtcattcgaagcgtcaataaaatatgtctcttaactatttccggccgttgtatatttaaatgacttcgtaagaaataatatatgggcgacttctcatctatgtaatcatatggagtgagatatagggctcgttctacctcctgccccttacccacctgtaataccaattgcggactcactgtatatcgcatatttatatcgtggggtaaagtgaaaatctactaccgatgatgtaagtcttacaatgttcgaaccagtaccagatcttaatttggaggcctccgtagaactaggggaggtaaatatagatcaaacaacacctatgataaaggagaatagcggttttatatcccgtagtagacgtctattcgcccatagatctaaggatgatgagagaaaactagcactacgattctttttacaaagactttattttttagatcatagagagattcattatttgttcagatgcgttgacgctgtaaaagacgtcactattaccaaaaaaaataacattatcgtggcgccttatatagcacttttaactatcgcatcaaaaggatgcaaacttacagaaacaatgattgaagcattctttccagaactatataatgaacatagtaagaaattcaaattcaactctcaagtatccatcatccaagaaaaactcggataccagtctggaaactatcacatttatgattttgaaccgtattactctacagtagctctggctattcgagatgaacattcatctggcatttttaatatccgtcaagagagttatctggtaagttcattatctgaaataacatatagattttatctaattaatctaaaatctgatcttgttcaatggagtgctagtacgggcgctgtaattaatcaaatggtaaatactgtattgattacagtgtatgaaaagttacaactggtcatagaaaatgattcacaatctacatgttcattggctgtggaatcagaacttccaataaaattacttaaagatagaaatgaattatttacaaaattcatcaacgagttaaaaaagaccagttcattcaagataagcaaacgcgataaggatacgttactaaaatattttacttaggagttagaatttatagacgactcatttcgtgtatcattgttactattactattactattactattactattactatcattattagtgttggtattattagtattcttcttgtcatcttgttcagaaatatacagcaatgctatacctaatactaaatacattatcatgcttgcaatggctctaacaacgacgaaccaaaatgaatttggtcgtagcttttgttcacaaaaatacataaagaaatgtctacataaatctatggcgccattggctacttgaaatagcgccagtcctcctacagattttaatatagctgtataacatgacatttattcatcatcaaaagagacagagtcaccatctgccatatttagattttttttcatgtgttcaaagtatcctctactcatttcattataatagtttatcatacttagaattttaggacggatcaatgagtaagacttgactagatcgtcagtagtaatttgtacatcgtctattctgcatccgcttcgtcgaataatgtatagcatcgctttgagattctccatagctatcaagtctttatacaatgacatggaaatatctgtgaatactttatacttctccaacatcgatgccttaacatcatcgcctactttagcattgaaaatacgttctattgtgtagatggatgtggcaagatttttaaacaacaatgccatcttacacgatgattgcctcaagtctccgatcgtttgtttagaacgattagctacagagtccaatgcttggctgactaacatattattatctttagaaattgtattcttcaatgaggcgtttatcatatctgtgatttcgttagtcatattacagtctgactgggttgtaatgttatccaacatatcacctatggatacggtacacgtaccagcatttgtaataatcctatctaagatgttgtatggcattgcgcagaaaatatcttctcctgtaatatctccactctcgataaatctactcagattattcttaaatgccttattctctggagaaaagatatcagtgtccatcatttcattaatagtatacgcagaaaagataccacgagtatcaattctatccaagatacttatcggttccgagtcacagataatggtttcctctccttcgggagatcctgcatagaaatatctaggacaatagtttctatactgtctgtaactctgataatctctaaagtcactaactgataccatgaaattgagaagatcaaacgctgaagtaatcaatttttctgcctcgtttttactacaactagttttcatcaatgtagtgacgatgtattgtttagttactcttggtctaatactgatgatagagatattattgcttcccataatggatcttctagtagtcaccttaaagcccattgatgcgaatagcagatagataaagtcttggtatgactcctttctaatatagtacggactacctttgtcacccaactttatacccacataagccataacaacctctttaatagccgtttcatgaggtttatcagccatgagcctgagtagttggaagaatctcatgaatcccgtctcggacagtcctatatgcatgatagatttatctttcctgggaaactctcgtatagtcatagatgaaatactcttcaaagtttctgaaataagattagtaacagtcttacctccgactactctgggtaacaaacatactctaataggtgttttctctgcggagataatatcagaaaggatagagcaataagtagtattattgtgattataaagaccgaatacataacaggtagaatttataaacatcatgtcctgaaggtttttagacttgtattcctcgtaatccataccgtcccaaaacatggatttggtaactttgatagccgtagatctttgttccttcgccaacatactaaggaaagtaataaagaatttgttgtttctatttatgtccacaaattgcacgtttggaagtgcaactgttacgttcactgcagcattttgaggatctcgagtatgaagtacgatgttattgtttactggtatatctggaaagatttctaccagtctaggaataagagattgatatctcatagaaatagaaaagtttataatctcatcatcaaagatcattctgttaccattgtaataaattggtactctatcataatcatcgacaaagtactgttcatacatgatgagatgtttatatgttggcatagtagtgagatcgacgtttggtaatggcaatgtattaagattaactccataatgtctagcagcatctgcgatgttataagtgttgtcaaatcggggtcgatcttgtgctgttatatattgtctaacacctataagattatcaaaatcttgtctgcttaatacaccgttaacaatttttgccttgaattcttttattggtgcattaataacatccttatagaggatgttaaacaaataagtattatcgaagttaagatctgggtatttcttttctgctagaacatccattgagtcggagccatctggtttaatataaccaccgataaatctagctctgtattctgtatccgtcaatctaatattaagaaggtgttgagtgaaaggtggaagatcgtaaaagttgtgagtattaataatagggttagtttccgaactaatgttaattggatgattaataatatcgatatttccagcgttaagtgtgacattaaacagtcttaattcacttgacgtggtatcaattaaataattaatgcccaatttggatatagcagcttgaagctcatcttgtttagttacggatcctaatgagttattaagcaatacatcgaacggatgaacgaaggttgttttgagttggtcacatactttgtaatctagacatagatgcggaagaacggtagaaactatacgaaatagatattcagagtcctctaattgatcaagagtaactattgacttaataggcatcatttatttagtattaaatgacgaccgtaccagtgacggatatacaaaacgacttaattacagagttttcagaagataattatccatctaacaaaaattatgaaataactcttcgtcaaatgtctattctaactcacgttaacaacgtggtagatagagaacataatgccgccgtagtgtcatctccagaggaaatatcctcacaaattaatgaagatctatttccagatgatgattctccggccactattatcgaaagagtacaacctcatactactattattgacgatactccacctcctacttttcgtagagagttattgatatcggaacaacgtcaacaacgagaaaaaagatttaatattacagtatcgaaaaatgctgaagcaataatggaatctagatctatgataacttctatcccaacacaaacaccatccttgggagtagtttatgataaagataaaagaattcagatgctagaggatgaagtggttaatcttagaaatcaacgatctaatacaaaatcatctgataatttggataattttaccagaatactatttggtaagactccgtataaatcaacagaagttaataagcgtatagccatcgttaattatgcaaatttgaacgggtctcccttatcagtcgaggacttggatgtttgttcggaggatgaaatagatagaatctataaaacaattaaacaatatcacgaaagtagaaaacgaaaaattatcgtcactaacgtgattattattgtcataaacattatcgagcaggcattgctaaaactcggatttgaagaaatcaaaggactgagtaccgatatcacttcagaaattatcgatgtggagatcggagatgactgcgatgctgtagcatcaaaactaggaatcggtaacagtccggttcttaatattgtattgtttatactcaagatattcgttaaacgaattaaaattatttaatttaatacattcccatatccagacaacaatcgtctggattaacttgttcctgtcgtctcataccggacgacatattaatctttttattagtatgcatctttttagatgatttctttttcccagcattaactgattcgatacctagaagatcgtgattgatctctccgaccattccacgaacttctaattgaccgtctctaacggtaccataaactattttaccagcattagtaacagcttggacaatctgaccatccattgcgttgaatgatgtagttgctgttgttctacgtctaggagcaccagaagtatttttggagcccttggatgttgatgtagaagaagacgaggattttgattttggtttacatgtaatacattttgaactctttgattttgtatcacatgcgccggcagtcacatctgtttgagaattaagattattgttgcctcctttgacggctgcatctccaccgatttgcgctagtagatttttaagctgtggtgtaatcttattaactgtttcgatataatcatcgtaactgcttctaacggttaaattttttttatccgccatttagaagctaaaaatatttttatttatgcagaagatttaactagattatacaatgaactaatatgatccttttctagattatttacaaacttggtatttcttggttctggaggaggtggattaggatccggattttgtgggctcttgatcttattatacagcgcgtataggatggcgacagtaactgctacacaaatgccgatcaaaagaagaataccaatcatttattgacaataacttcactatgatcaagtatgtaatatatatcatcttttcactaaataagtagtaataacgattcaacaatgtcgagatatatggacgataataatttagttcacggaaatatcgctatgattggtgtgaatgactccgctaactctgtggggtgcgcagtgctttccccacatagaataaattagcattccgactgtgataataataccaagtataaacgccataatactcaatactttccatgtacgagtgggactggtagacttactaaagtcaataaaggcgaagatacacgaaagaatcaaaagaatgattccagcgattagcacgccggaaaaataatttccaatcataagcatcatgtccatttaactaataaaaattttaaattgccgaatgaacaaagtggaatataaaccatataaaaacaatagtttgtactgcaaaaataatatctatttttgttttcgaagatatggtaaaattaaatagtagtacacaacatgttataactaacagtagcaacggctcgtaattacttatcatttactagacgaaaaggtggtgggatattttcttgctcaaataatacgaatatatcacccatccattttatgcgatgtttatatactctaatctttaataaatctatagacgacgggtttaccaacaatatagattttatcgattcatctaatttaaacccttccttaaacgtgaatgatttattatctggcataacgatgaccctacctgatgaatcggataatgtattgggccatgtagaataaattatcaacgaattatcgtctacgaacatttatatcatttgttttaattttaggacgcgaataaatagatataaaatagaaaataacagatattacaaccagtgttatggccgcgcccaaccaggtaggcagttttattttatcttttactacaggttctcctggatgtacgtcaccaactgcagacgtagttctagtacaattagacataagttccgcttgggaattttttaacgctaaagagttaacgttaaccgtacacccaacgtatttacatctagttctttgaacatcttgattataatataaccattttctatctctagattcgtcagtgcactcatgtaaccaacataccctaggtcccaaatatttatctccggaatttgattttggataattcgcacaccaacaatttctatttcctttatgatcgttacaaaagacatataatgctgtatccccaaaagtaaaataatcaggacgaacaattctaataaactcagaacaatatctcgcatccatatgtttggaacaaatatcagaataagtagacatagccggttttcgttttgctcgtaaccattctaaacaattggggtttccaggatcgtttctacaaaatccagtcatgaaatcgtcacaatgttcggtcttgtaattattattaaatatttttggacagtgtttggtatttgtcttagaacaacattttgccacgctatcgctatcgcccaggagataatccttttttataaaatgacatcgttgcccggatgctatataatcagtagcatgttttaaatccttaatatattcaggagttacctcgttctgataatagattaatgatccaggacgaaatttgaaagaactacatggttctccacgaattaatacatattgtttagcaaattcaggaactataaaactactgcaatgatctatcgacataccatctatcaaacaaaatttgggtttaatttctcctggagacgtttcataataatacatataactttcttcggcaaacctaacagctctattatattcaggataattaaaacctaataccatatatttgtctcgtatatctgctattcctgtctctattttgatgctattaagagtaacagctgcccccattcttaataatcgtcagtatttaaactgttaaatgttggtatatcaacatctatcttatttcccgcagtataaggtttgttacatgtatgatgttcaggaatggttatatttattcttttatagtcctgtctttcgatgttcatcacatatgcaaagaacagaataaacaaaataatgtaagaaataatattaaatatctgtgaattcgtaaatacattgattgccataataattacagcagctacaatacacacaatagacattcccacagtgttgccattacctccacgatacatttgagttactaagcaataggtaataactaagctagtaagaggcaatagaaaagatgagataaatatcatcaatatagagattagaggagggctatatagagccaagacgaacaaaatcaaaccgagtaacgttctaacatcattatttttgaagattcccaaataatcattcattcctcgataatcgttttgtatcatacctccatctgtaggcataaacgattgttgctgttcctctgtaaataaatctttatcaagcactccagcacccgcagagaagtcgtcaagcatattgtaatatcttaaataactcatttatatattaaaaaatgtcactattaaagatggagtataatctttatgccgaactaaaaaaaatgacttgtggtcagcccataagtctttttaatgaagacggtgatttcgtagaagttgaaccaggatcatcctttaagtttctaatacctaagggattttactcctctccttccgtaaagacgagtctagtattcgagacattaacaacgaccgataataaaattactagtatcaatccaataaatgcgccaaagttatatcctcttcaacgcaaagtcgtatctgaagtagtttctaatatgaggaaaatgatcgaattaaaacgtcctctatacatcactcttcacttggcgtgtggatttggtaagactattaccacgtgttatcttatggccacgcacggcagaaaaaccatcatttgcgtacccaataaaatgttaatacatcaatggaagacattggtagaggcagtcggattggaacataagatatctatagatggtgttagtagtctattaaaggaactaaagactcaaagtccggatgtattaatcgtagtcagtagacatctgacaaacgatgcattttgtaaatatatcaataagcattatgatttgttcatcttggatgaatcacatacgtataatctgatgaacaatacagcagttacaagatttttagcgtattatcctccgatgatgtgttattttttaactgctacacctagaccagctaacagaatttattgtaacagtattattaatattgccaagttatccgatctaaaaaaaactatctatgtagtggatagtttttttgatccatattccacagataatattagacatatgataaaacgactagatggaccatctaataaatatcatatatataccgagaagttattatctgtagacgagcctagaaatcaacttattcttgataccctggtagaagaattcaaatcgggaactattaatcgaattttagttattaccaaactacgtgaacatatggtaatgttctacaaacgattattagatcttttcggaccagaggttgtatttataggagacgcccaaaatagacgtactccagatatggtcaaatcaatcaaggaactaaatagatttatatttgtatccaccttattttattccggtactggtttagatattcctagtttggattctttgttcatttgctcagcagtaatcaacaatatgcaaatagagcaattactagggagggtatgtcgagaaacagaactattagataggacggtatatgtatttcctagcacatccattaaagaaataaagtacatgataggaaattttgtacaacgaattattagtctatctgtagataaactaggatttaaacaagaaagttatcggaaacatcaagaatccgatcccacttctacatgtacaacatcctccagagaagaacgtgtattaaatagaatatttaactcgcaaaatcgttaagaagtttaagcgacgatccgcatgctgcacaggccagtgtattacccctcatagtattaatataatccaatgatacttttgtgatatcggaaatcttaaccaatttagactgacagacagaacacgtcatgcaatcatcatcgtcatcgataactgtagtcttgggcttctttttgcggctcttcattccggaacgcgcgttggtactatccatttaggtagtaaaaaataagtcagaatatgccctatagcacgatcgtacaaaacctggtagtatatcgtctctatctttatcacaatatagtgtatcgacatctttattattattgacctcgtttatcttggaacatggaatgggaacatttttgttatcgacagccacctttgccttaattccagatgttgtaaaattataactaaacattctatcatcgacacaaatgaaattcttgtttagacgtttgtagtttacgtatgcggctcgttctcgtctcattttttcagatattgcaggtactataatattaaaaataagaatgaaataacataggattaaaaataaagttatcatgacttctagtgctgatttaactaacttaaaagaattacttagtctgtacaaaagtttgagattttcagattctgcggctatagagaagtataattctttggtagaatggggaacatctacttactggaaaataggcgtacaaaaggtagctaatgtcgagacgtccatatctgattattatgatgaggtaaaaaataaaccgtttaatattgatccggggtattatattttcttaccggtatattttggaagcgtctttatttattcgaagggtaaaaatatggtagaactaggatctggaaactcttttcaaataccagatgatatgcgaagtgcgtgtaacaaagtattagacagcgataacggaatagactttctgagatttgttttgttaaacaatagatggataatggaagatgctatatcaaaatatcagtctccagttaatatatttaaactagcgagtgagtacggattaaacatacccaaatatttagaaattgaaatagaggaagacacattatttgacgacgaattatactctattatagaacgatctttcgatgataaatttccaaaaatatctatatcgtatattaagttgggagaacttaagcggcaagttgtagactttttcaaattctcattcgtgtatattgagtccatcaaggtagatcgtataggagataatatttttattcctagcgttataacaaaatcaggaaaaaagatattagtaaaagatgtagaccatttaatacgatccaaggttagagaacatacatttgtaaaagtaaaaaagaaaaacacattttccattttatacgactatgatgggaacggaacagaaactagaggagaagtaataaaacgaattatagacactataggacgagactattatgttaacggaaagtatttctctaagattggtagtgccggcttaaagcaattgactaataaattagatattaatgagtgtgcaaccgtcgatgatttagttgatgagattaataaatccggaactgtaaaacgaaaaataaaaaaccaatcagtatttgatttaagcagagaatgtttgggatatccagaagcggattttataacgttagttaataacatgcggttcaaaatagaaaattgtaaggttgtaaatttcaatattgaaaatactaattgtttaaataacccgagtattgaaactatatatggaaactttaaccagttcgtctcaatctttaataccgttaccgatgtcaaaaaaagattattcgagtgaaataatatgcgcctttgatataggtgcaaaaaatcctgctagaactgttttagaagtcaaggataactccgttagggtattggatatatcaaaattagactggagttctgattgggaaaggcgcatagctaaagatttgtcacaatatgaatacactacagttcttctagaacgtcagcctagaaggtcaccgtacgtcaaatttatctattttattaaaggctttttatatcatacatcggctaccaaagttatttgcgtctcgcctgtcatgtctggtaattcatatagagatcgaaaaaagagatctgttgaagcatttcttgattggatggacacatttggattgcgagactccgttccggatagacgcaaattagacgatgtagcggatagtttcaatttggctatgagatacgtattagataaatggaatactaattatacaccttataatagatgtaaatctagaaattacataaaaaaaatgtaataacgttagtaacgccattatggataatctatttacctttctacatgaaatagaagatagatatgccagaactatttttaactttcatctaataagttgcgatgaaataggagatatatatggtcttatgaaagaacgcatttcctcagaggatatgtttgataatatagtatataataaagatatacatcccgccattaagaaactagtttattgcgacatccaacttactaaacacattattaatcagaatacgtatccggtatttaacgattcttcacaagtgaaatgttgtcattatttcgatataaactcagataatagcaatattagctctcgtacagtagagatatttgagagggaaaagtcatctcttgtatcatatattaaaactaccaataagaagagaaaggtcaattatggggaaataaagaaaactgtacatggaggcactaatgcaaattacttttccggtaaaaaatctgatgagtatttgagcactacagttagatccaacattaatcaaccttggatcaaaaccatctctaagaggatgagagtcgatatcattaatcactctatagtaacgcgtggaaaaagctctatattacaaactatagaaattatttttactaatagaacatgtgtgaaaatattcaaggactctactatgcacattattctatccaaggacaaggatgaaaaggggtgtatacacatgattgataaattattctatgtctattataatttatttctgttgttcgaggatatcatccaaaacaaatactttaacgaagtagccaatattgtaaaccacgtactcacggttacggcattagatgagaaattattcctaattaagaaaatggctgaacacgatgtttatggagttagcaatttcaaaatagggatgtttaacctgacatttattaagtcgttggatcatacagttttcccctctctgttagatgaggatagcaaaataaagttttttaaggggaaaaagctcaatattgtagcattacgctctctggatgattgtataaattacgtgactaaatccgagaatatgatagaaatgatgaaggaaagatcgactattttaaatagcatagatatagaaacggaatcggtagatcgtctaaaagaattgcttctaaaatgaaaaaaaacactgattcagaaatggatcaacgactaggatataagtttttggtgcctgatcctaaagccggagttttttatagaccgttacatttccaatatgtatcgtattctaattttatattgcatcgattgcatgaaatcttgaccgtcaagcggccactcttatcgtttaagaataatacagaacgaattatgatagaaattagcaatgttaaagtgactcctccagattactcacctataatcgcgagtattaaaggtaagagttatgacgcattagcaacgttcactgtaaatatctttaaagaggtaatgaccaaagagggtatatccatcactaaaataagtagttatgagggaaaagattctcatttgataaaaattccgctactaataggatacgggaataaaaatccacttgatacagccaagtatcttgttcctaatgtcataggtggagtctttatcaataaacaatctgtcgaaaaagtaggaattaatctagtagaaaagattacaacatggccaaaatttagggttgttaagccaaactcattcactttctcgttttcctccgtatcccctcctaatgtattaccgacaagatatcgccattacaagatatctctggatatatcacaattggaagcatcgaatatatcatctacaaagacatttataacggtcaatattgttttgctgtctcaatatttatctagagtgagtctagaattcattagacgtagtttatcatacgatatgcctccagaagttgtgtatctagtaaacgcgataatagatagtgctaaacgaattactgaatctattactgactttaatattgatacatacattaatgacctggtggaagctgaacacattaaacaaaaatctcagttaacgattaacgagttcaaatatgaaatgctgcataactttttacctcatatgaactatacacccgatcaactaaagggattttatatgatatctttactaagaaagtttctctactgtatctaccacacttctagatatccagatagagattcgatggtttgtcatcgtatactaacatacggcaaatattttgagacgttggcacatgatgaattagagaattacataggcaacatcagaaacgacatcatgaacaatcacaagaacagaggcacttacgcggtaaacattcatgtactaacaactcccggacttaatcatgcattttctagtctattgagtggaaagttcaaaaagtcagacggtagttatcgaacacatcctcactattcatggatgcagaatatttctattcctagaagtgttggattttatcctgatcaagtaaagatttcaaagatgttttctgtcagaaaataccatccaagtcaatatctttacttttgttcatcagacgttccggaaagaggtcctcaggtaggtttagtatctcaattgtctgttctgagttccattacaaatatactaacgtctgagtatttggatttggaaaagaaaatttgtgagtatatcagatcatattataaagatgatataagttactttgaaacaggatttcctattactatagaaaatgctctagtcgcatctcttaatccaaatatgatatgtgattttgtaactgactttagacgtagaaaacggatgggattcttcggtaacttggaggtaggtattactttagttagggatcacatgaatgaaattcgcattaatattggagcaggaagattagtcagaccattcttggttgtggataacggagagctcatgatggatgtgtgtcaggagttagaaagcagattagacgacatgacattctctgacattcagaaagagtttccacatgtcatcgaaatggtagatatagaacaatttacttttagtaacgtatgtgaatcggttcaaaaatttagaatgatgtcaaaggatgaaagaaagcaatacgatttatgtgactttcctgccgaatttagagatggatatgtagcatcttcactagtgggaatcaatcacaattctggacccagagctattcttggatgtgctcaagctaaacaagctatctcttgtctgagttcggatatacgaaataaaatagacaatggaattcatttgatgtatccagagagaccaattgtcattagtaaggctttagaaacttcaaagattgcggccaattgcttcggacaacatgttactatagcattaatgtcgtacaaaggtatcaatcaagaggatggaattatcatcaaaaaacaatttattcagagaggcggtctcgatattgttacagccaagaaacatcaagtagaaattccattggaaaactttaataacaaagaaagagataggtctaacgcctattcaaaattagaaagtaatggattagttagactgaatgctttcttggaatccggagacgctatggcacgaaatatctcatcaagaactcttgaagatgattttgctagagataatcagattagcttcgatgtttccgagaaatataccgatatgtacaaatctcgcgttgaacgagtgcaagtagaacttactgacaaagttaaggtacgagtattaaccatgaaagaaagaagacccattctaggagacaaatttaccactagaacgagtcaaaagggaacagtcgcgtatatcgcggatgaaactgaacttccatacgacgaaaatggtatcacgccagatgtcattattaattctacatccatcttctctagaaaaactatatctatgttgatagaagttattttaacagcagcatattctgctaagccgtataacaataatggagaaaacagacctgtctgttttccgagtagtaacgaaacatcgatagatacatatatgcaattcgctaaacaatgttacgagcattcaaatccacaattgacagatgatgaattgtcggataaagtcttttgtgaaaagattctctacgatccagaaacggataaaccttatgcatccaaagtattttttggaccaatttattacttgcgtctgagacatttaactcaggataaggccaccgttagatgtagaggtaaaaagacgaagctcattagacaagcaaatgagggacgaaaacgtggaggtggtatcaagttcggagaaatggagagagactgtttaatagcacatggtgcagcaaatactattacagaagttttgaaagattcggaagaagactatcaagacgtatacatttgtgaaaactgtggagatatagcagcacaaattaaaggtattaatacatgtcttcgatgttcaaaacttaatctctctcctctattaacaaaaatagataccactcacgtatctaaagtatttctgactcaaatgaacgcaagaggtgtaaaagtcaaattagatttcgaaagaaggcctccttcgttttacaaacaattagataaagtagacctaaaaccatcttttcttaagtagatattggtagaagatatgcactaacatcatatgcttcttcctgtaattctccccatattggatcatgaggtggattattgataacatgtggaggaggttgaggtatagatggtacttgagatcctgatgatggatgttctggtagagtattatccattggatgagatgtgctatgtgatttatctgtcgatggatcttctggatgttgtgaaacttctagagtatccactggagatgtaacatgaggtttatctgttgacggagttggagattttggcattgtatcttcagaagtaacaacttcattatcatggacttttgtatctagagctagtacatcaacgccagaatctgtaatattgcatttggagaggtaacgatcgcgttctagttctcttttgtagaacttaactttttctttctccgcatctagctggtattccaacttcttcacattagaacgttctaattgcaactcgcgttcgcattgaactccgccacagtctttacgagcgatttcacgttccagatcgtgctcagccttcatgcgtctctccctctctctatcgaatttatcagaatagtctttctgaagacgatcgaattctacaaatttttccaataccttaatcgtttccatgcatctccgaagttctgcttcgagaaccgcgattctttttctctcgaaatcacagactgagtgacaatttccacttcctccattaccgcaatctctgagtttcctttctagatccgcgatttttatcaacatctcttctccgtgtctcttacaatcctctagtctacgatcgttgaaatatttttccaattccttttcaacctcaacaactttaacacgttgtctctcgagttctctcttgtagtagctatcatttttatctgattccctagcgcgtctgagatcttcgtgtaattgtgtcaactctcgacgtagacgcttaacctcagatctagcctcttcgtcaaagtacgtgcaatatccatgtgatccgttattatggcgtctacaatcggcgagatctcgtttcagtgattcaatctctttcttatacttgattatatcctcattagtaccgttgtgtgattcacagtactctagttgttgtttgagatctttaatacggttctttagcctatctatttcctcagaagatgatccattaccgttacgtctacactcattaagttgcttatccagatccatgattctatttctcagacgttccatctctttttttgtatcggcattatggtcattattacgtctgcaatcagttagctgcctttccagatccgtaattctagatttgagtctgttaatctctgtaatattgtttcctccattatccatgcaatcagacaacttgttctccaggtccttgatacgtgaacgtagtgcctctacttcctgtgtgttttcttgattcctcatgcattcattgagtttgttttctagatctctagtattccgtcgttcatcctctagttccctatgtgccacagagagattttgttgatatctagcgatttcggattccagactagtaactctattggtgtatgtcataatagttatattggccttatcgagatcctccttgtattggttgcattcggtgatgtctctacgaagtctagacagttcccgttcggcgtcacgacgtttgtcgatttcgactcggagatcttcatcacgttgctttagccacatacgactgagttcaagttctcgttgacatgatccatcaacctttccattcctaatagtatccagttccttttctagttctgcacgcatttcccgttccctatcaagagattctctcaattccttaatagtctttttatcaatttctgctaatgctgaacaattgttggatccaccacccatatcccttagttctttgatctcatttgttagttgttcgatcctttcatttttatatacagaatccctttccaaagtcctaattttaccgagtttatcactaagttctttattcatgtcattgagctttttcttggcttcttccaactctctcgtaaactcttctccaccatttccgcattcttcctcgcatttatctaaccattcagttagtttgttaatgacaagttgataatcagcaattgcaagcgccgaccgtacgatagtgatatcattatctgctgtattatatggcattggtttggcgttgtctggattatgacgtgtcgaatctccaccatttgaaggagattctccggagtcaatagattctacacctttagttcctatatccataccaccagacgtatgcgaatatttgtcatatatgtctacttccttatccatcaagtatctataatctggttctacttctgagtattcttttctaagagacacaacttcgggagtcaatagtagaactctatttctgtatctatcgatgctggaatcgatactcaagttaagaatagcaaacacatcatcttcatcatcggtatcttctgtaacaccatcatatgacatttcatgaagcctgacatactgataaatagaatcagatttagtattaaacagatccttatactttttagtaaagacatatgtgtattttagatctccagattttataatatgatcacatgccttaaatgtcagtgcttccattatatagtctggaacgctaataggtgtcgaaaaagatgctgggccatatgctatgttaataaatggctctgaatcactaattattagattatgattaatgttaaggaaaaggaaaaattcattatatagatacgcattagctttatatcttgtactaaacacactaaataatttattaatgtggtcaatatccagtaaaataattatggttgctggaacaccaacgaacatattaccacatccatacttactatgaatatcacatatcgtgttaaacaatcttgatagaagagatgttaattcgtcaggatcaatgagttgtaattcagcagcagcatatgtcataactgtaaaaagaacatactttcctgtggtgttaactgaagacaccagatcaacgccattattaaaaatagtgttatatgcatctttaataggttctccgttaacagttgaattctctagaattttgaaacacgttgttttcttatttgtgattagtgaattagtgatatcacgaagaatattacgaattacatttcttgtttttcttgagagaccggattcagaactcaactcatcgttccatagtttttctacctcagtggcgaaatctttggagtgcttggtacatttttcaataaggttcgtgacctccatttattataaaaaaattttattcaaaacttaactacaatcgggtaattataagatcgtagatctcccatgtggcggaatactaccatctatcgcatgtggatggacagtaggtaatggccatgggaacagtaatgattgtatatttatctttcttgctagtattactgcatattgtcccaatgtttcgatgtggtgttctaacctatcaactgccgctgtattacaacaatagtgtccgatggaattaagattatgatccaatgtgtttaatatatgattatcaagtcttatacgatccgcgtcttttttgacaggatcaggttcttctacaggaagaagtttcggcctcttatgatattcatgtctgggaaacggtggtctagggtgaggctccggtatcggagtgggttttggattataatcatcatcgtctatgacatcctcatcatcatcttcgacttcgatatttattttgctatcttgatgatgtcctgtatcagttgcattttcagcactcgactgaatattagcgcattcattgtctattattaccatatttctaaacccaaaatgtatgtgttgaacatcactactatcgtggatgagtcttatagcatgaattcgcttatcgttatcgggtttagcttctgtcaccttagcaattccttttttattaaactctacataatcataaccatttctattgtttgttctaatataaacgagtatagaatcattgctaaatttttcaatagtatcgaaaacagaatatcctaaaccatataatatatattcaggaacactcaaactaaatgtccaggattctcctaaatacgtaaactttaatagtgcgaaatcattcaaaaatctaccgcttatagatagatagtatatgaatgcgtatagtagtctacctatctctttattacgaaaaccggcattacgatcatatatgtcgtgatatacctgtgatccgtttacgttaaaccataaatacatgggtgatcatataaacatgaatttattcctaattctcagagatatagttaattgatcgtataatatttgcttacatgcatacttgatacgctcattaataagatttttatcattgctcgttatctcagaatcgtatatataaggagtaccatcgtgattcttaccagatattatacaaaatactatatataaaatatattgaccaatgttagtaatcatataaatgtttaacgttttaaattttgtattcaatgatccattatcatacgctagcatggtcttatgatattcattctttaaaatataatattgtgttagccattgcattggggctcctaatggagattttctattctcatccattttgggataggctttcataaagtccctaataacttcgtgaataatgtttctatgttttctactgatgcatgtatttgcttcgatttttttatcccatgtttcatctatcatagatttaaacgcagtaatgctcgcaacattaacatcgtgaaccgttggcacaattccgttccataaatttataatgttcgccatttatataactcattttttgaatatacttttaattaaacaaaagagttaagttcattcatatggacggcgtccagtctgtacatcaatctttttagccagagatatcatagccgctctcagagtttcagcgtgattttccaacctaaatagaacttcatcgttgcgtttacaacacttttcgatttgttcaaactttgttgttacattagtaatctttttttccaaattagttagccgttgtttgagagtttcctcattgtcgtctccatcggctttaacagttgcttcgtgtttatcctctggctttttagcagcctttgtagagaaaaattcagttgctggaattgcaagatcatcatctccggggaaaagagttccgtccatttaaagtacagattttagaaactgacactctgcgttatttatatttggtgcaacacatggattataaatatcgatgttaataacatcagaaaatgtaaagtctatacattgttgcatcgtgttaaattttctaatggatctagtattattgagtccaacttctgtctgaaatccaaatatagaagcggatacaaaaccgtttcctggataaaccacacatctccacttttgctttacatcagaaattgtgtcattgacatcttgaactctcctatctaatgctggtgtaccacctatagattttgaatattcgaatgctgcatgcgtagcattaaattccttaatattgccataattttcatatattgagtaaccctggataaaaagtaaacacactgcagccgtcgctaccacaataaaaaaaattgatagagagttcatttataatatattagaagctgacaaaatttttttacacgcatcagacaatgctttaataaatagttcaacatctacttttgtcatatcgaaccgatggtatgattctaacctagaattacatccgaaaaagttgactatgttcatagtcattaagtcattaacaaacaatattccagactctggattataagatgatactgtttcgtcacaatcacctaccttaatcatgtgattatgaatattggctattagagaaccttctaagaaatctataatatctttgaaacacgatttaaaatcaaaccacgaatatacttctacgaagaaagttagtttacccataggagagataactataaatggagatctagatacaaaatccggatctatgatagttttaatattattatattctctattaaatacctcaacatctaaaaatgttaattttgaaactatgtcttcgcttattaccgtacctgaactaaacgctataagctctattgtttgcgaactctttaaacgatattcttgaaatacatgtaacaaagtttcctttaactcggtcggtttatccaccatagttacagaatttgtatccttatctataatataataatcaaaatcgtataaagttatataattatcgcgttcagattgtgatcttttcaaatagactaaaaaccccatttctctagtaagtatcttatgtatatgtttgtaaaatatcttcatggtaggaatatgctctaccgcagttagccattcctcattgacagctgtagatgtattagacaaaactattccaatgtttaacaagggccattttacgagattattaaatccttgtttgataaatgtagccaatgagggttcgagttcaacgacgattgaattctcttcccgcggatactgcatgatgaactacgggatgttgttcgattgatttggaattctttttcgactttttgtttatattaaatattttaaagtttatagctgatagcaattcatgtactacggataatgtagatgagtattgtacatcgatatctttattattagataaatttatcaataaatgtgagaagtttgcctcgttaaggtcttccatttaaatattatataaacatttgtgtttgcatcttattcgtcttttgtggaatagtttttaactagtaaagctgtaattacatactttgtccgtaaaacataaatataaacaccagctcttatcaaccgttccaaaaagtcgacggcggacatttttaacatggaatctattttaaatacgcttagatttctagaaaaaacatcattttataattgtgacaatttaataactactgaaaagataaagattaaacataagggaatggcatttgtattttataagccaaagcattctaccgttgttaaatacttgtctggaggaggtatatatcatgatgaattggttgtattggggaaggtaacaattaatgatctaaagatgatgctattttacatggatttatcatatcatggagtaacacgtagcggagcaatttacaaattgggatcatccatagatagactttctctaaataggactattgttacaaaagttaataataattataattatgatacattttttgacgacgatgattgatcgctattgcacaattttgtttttttactttctaatatagtgtttaggttctttttcatatgtgaatattgatttactaaaatatctatgtttaacttttgttctataacgtccttatcagcggtatcggtacatatacgtaattcaccttcacaaaatacggagtcttcgataataatagccaatctattattggatctagccgtctgtatcatattcaacatatttaatatatcctttcgtttcccctttacaggcattgatcgtagcatattttccgcgtctgagatggaaatgttaaaactacaaaaatgcgtaatgttagcccgtcccaatattggtacgtgtctataagtttggcatagtagaataatagacgtgttcaaatgccttccaaagtttaagaattctattagagtattgcattttgatagtttatcacctacatcatcaaaaataagtaaaaagtgtgctgattttttatgattttgtgcgacagcaatacatttttctatgttacttttagttcgtatcagattatattctagagcttcctgactactaacgaaattaatatgatttggccaaatgtatccatcataatctggattataaacgggtgtaaacaagaatatatgtttatattttttaactagtgtagaaaacagagatagtaaatagatagtttttccagatccagatcctcccgttaaaaccattctaaacggcatttttaataaattttctcttgaaaactgtttttcttgaaaacaattcataattatatttacagttactaaattaatttgataataaatcaaaatatggaaaactaaggtcgttagtagggaggcgaacaaagaaggaatatcgtgatataaataatatttattatcatgatgacgccagaaaacgacgaagagcagacatctgtgttctccgctactgtttacggagacaaaattcagggaaaaaataaacgcaaacgcgcgattggtctatgtattagaatatctatggttatttcactactatctatgattaccatgtccgcgtttctcatagtgcgcctaaatcaatgcatgtctgctaacgaggttgctattactgactccgctgttgacgttgctgctacatcatctactcatagaaaggttgcgtctagcactacacaatatgatcgcaaagaaagctgtaatggtttatattaccagggttcttgttatatactacattcagactataagtcatttgaggatgctaaagcaaactgcactgtggaatcattaatactacccaataaatccgatgtcttggctacctggctagctgaatatgttgaggatacatggggatctgacggcaatccaattacaaaaactacatccgagtatcaagattctgatgtatcacgagaagttagaaagtatttttgtgttaaaataatgaactaatatttatttttgtacataaataaatgaaatcgcttaatagacaaactgtaagtaggtttaagaagttgtcggtgccggccgccataatgatgatactctcaaccattattagcggcataggaacatttctgcattacaaagaagaactgatgcctagtgcttgcgccaatggatggatacaatatgataaacattgttatctggataccaacattaaaatgtccacagataatgcagtttatcagtgtcgtaaattacgagctagattgcctagacctgatactagacatctgagagtattgtttagtattttttataaagagtattgggtaagtttaaaaaagaccaataataaatggttagatatgaataataataaagatgtagatattagtaaattaacaaattttaaacaactaaacggtactacggattctgaagcgtgttatatatacaagtctggaaaactgtctaaaacagtatgtaaaagtactcaatctgtactatgtgttaaaagattctacaagtaacgacaaaaatgaaataataataagtccttaacgaacgtcgccatggacgccgcgtttgttattactccaatgggtgtgttgactataacagatacattatatgaggatctcgatatctcaataatagactttataggaccatatattataggtaacataaaaactgtccaaatagatgtatgggatataaaatattccgacatgcaaaaatgctactttagctataagggtaaaatagttcctcaggattctaatgatttggctagattcaacatttatagcatttgtgcagcatacagatcaaaaaataccatcatcatagcatgcgactatgatatcatgttagatatagaaggtaaacatcagccattttatctattcccatctattgatgtttttaacgctacaatcatagaagcgtataatctgtatacagctggagattatcatctgatcatcaatccttcagatgatctgaaaatgaaattgttgtttaattcttcattctgcatatcagacggcaatggatggctcataattgatgggaaatgcaatagtaattttttatcataaaagttgtaaagtaaattaataaaacaacaaatattgaactagtagtacgtatattgagcaatcagaaatgatgctggtaccacttatcacggtgaccgtagttgcgggaacaatattagtatgttatatattatatatttgtaggaaaaagatatgtactgtctataatgacaacaaaattatcatgacaaaattaaaaaagataaagaattctaattccagcaaatctagtaaatcaactgatagcgaatcagactgggatgatcactgtagtgccatggaacaaaataatgacgtagataatatttctaggaatgagatattggatgatgatagcttcgctggtagtttaatatgggataacgaatcccatgtcatggcgcctagcacggaacatatttacgatagtgttgccggaagcacgctgctaataaatagcaatcgtaatgaacagacttcagaacactacgtaattaatgagacagagactgttgaagtacttaatgaagataccaaacagaatcctaactttcatccaatcctttcgtaaattataataaaaccagtattgtagcaagtcaaatccgtttattacagaactcaacaataaatttagtgagaataatccgtttagacgagtacatagcgatgattatcttaataagcaagaacaagaccaagaacaagatcgtgaacacgatgatatagaatcatcggttggcgtgattggtttccttttttataaaattgaagtaatatttagtattaatcgctgccgtcacgttgtacaaatggagatattccctgtactcagcatttctaaaattagcaattttattgctaataatgactgtagatattaatatagatgcagaacatcaaaaaattatatctgatgagatcaatagacagatggatgaaacggtacttcttaccaacatcttaagcgtagaagttgtaaacgacaatgagatgtaccatcttattcctcatagactatcgacgattatactctgtattagttctgtcggaggatgtgttatctctatagataatgacgtcaatgacaaaaatattctaacctttcccattgatcattgtaatcatatccccactgagtaaatgtgtcgtagttagcaagggtcctacgaccatattggttgttaaagcggatatatccagcaaacgactactatatgtaaacaatctgtcactgattaattatttgccgttgtctgtattcattattagacgagttaccgactatttggatagacacatatgcgatcagatatttgcgaataataagtggtattccattataaccatcgacaataagcagtttcctattccatcaaactgtataggtatgtcctctgccaagtacatacattctagcatcgcacaagatactttaatccatgtttgtaacctcgagcatccgttcgactcagtatacaaaaaatgtagtcgtgcaattctctacctatcaaggaacaaatattgtacggcagaattgataatataaatatgagaattagtatttctgtggattaatagatttctagtatgggatcattaatcatctctaaatacctcataaaacgaaaaaatgctgctacaaatgaaaaaaagctattatcaaatactgtacggaatggattcattcttttctctttttatgaaactctgttgtatatctactgataaaactggaagcaaaaaaatctgataggaagaacaaggattatatggaacacgattattataaaataacaatagttcctggttcctcttccacgtcgactagctcgtggtattatacacatgcctagtaatagtctctttgcgttgacggaaagtagactagaaataacaggctaaaatgttcagacaccataatagttcccaacccagataataacagagttccatcaacacattcctttaaactcaatcccaaacccaaaaccgttaaaatgtatccagccaattgatagtaaataattaggtgtacagcacatgataatttacacagtaaccaaaatgaaaacactttagtaattataagaaatatagacggtaatgttatcatcaacaatccgataatatgccggagagtaaacattgacggataaaacaaaaatgccccgcataactctatcatggcaatgacacaaccaaacacttgtaaaattcctaaattggtagaaaatacaacagatatcgatgtataagcgatttcgagaaataataagaataaagtaatgcccgtaaagataaacatcaacgttgtttggtaatcattaaaccaattagtatgacattgaactaatttcacagtagattttattccagtattgtcaccgcatgtatacgtacctggtaagatatctttatattccataatcaacgagacatcattatccgataacgaatgaagtctagcactagtatgccatttacttaatatagtcgtcttggaagttttattataagttaaaatatcatgattgtccaatttccatctaatatactttgtcggattgtctatagtacatggaataatgatggtatcattgcacgctgtgtactctatggtctttgtagttgttataacaaccaacgtatagaggtatatcaacgatattctaactcttaacatttttatttatttaaatgatacctttgttatttattttattctattttactaactgtatcgaatggcataagtttgaaacgagtgaagaaataatttctacttacttaatagatgatgtattatacacgggcgttaatggggcggtatatacattttcaaataatgaactaaacaaaactggtttaactaataacaataattatatcacaacatctataaaagtagaggatacattagtatgcggaaccaataacggaaaccccaaatgttggaaaatagacggttccgaagatccaaaatatagaggtagaggatatgctccttatcaaaatagtaaagtgacgataatcagtcataacgaatgtgtactatctgatataaacatatcaaaagaaggaattaaaagatggagaagatttgacggaccatgtggttatgatttatacacggcagataacgtgattccaaaagatggtgtgcgtggagcattcgttgataaagacggcacttatgacaaagtttacattcttttcactgatactatcgacacaaagagaattgttaaaattccgtatatagcacaaatgtgcttaaatgacgaaggtggtccatcatcattgtctagtcatagatggtcgacgtttctcaaggtcgaattagaatgtgatatcgacggaagaagttatagacaaattattcattctaaagctataaaaacagataatgatacgatactatatgtattctttgatagtccttattccaagtccgcattatgtacctattctatgaatgccattaaacactctttttctacgtcaaaattgggaggatatacaaagcaattgccgtctccagctcctggtatatgtctaccagctggaaaagttgttccacataccacgtttgacatcatagaacaatataatgagctagatgatattataaagcctttatctcaacctatcttcgaaggaccgtctggtgttaaatggttcgatataaaggagaaggaaaatgaacatcgggaatatagaatatacttcataaaagaaaatactatatattcgttcgatacaaaatctaaacaaactcgtagtgcacaagttgatgcgcgactattttcagtaatggtaacttcgaaaccgttatttatagcagatatagggataggagtaggaataccacgaatgaaaaaaatacttaaaatgtaatcttaatcgagtcaccacatgacaatgaacaaacctaagacagattatgctttatgcttgttgtgttgtaatatgtggtctgattatcggaattatttttacagcaacgctattaaaagttgtagaacgtaaattagttcatacaccatcaatagataagacgataaaagatgcatacattagagaagattgtctgactgactggataagctataataaatgtatccatttatctactgatcgaaaaacctggaaggaaggacgtaatatgcaaagctctaaatccaaattctgatctaattaagatagagactcccaaacgagttaagctttttaagacgccttagaagaggctattgggtaggagaatccgaaatattaaaccagacaaccacatataattttatagctaagaataccacaaagaatggaactaaaaacggaaatatatttgtagtacaactaatattcccccccccccccccccccccaaactgcattcgtggttacactatataatataataatacataaaactatgctacatttttatcataacactatttctgttagatggtttagaaaaaaaataaatatctccgtaccgttcttgtttttataaaaataacaattaacaattaacaaattttttctttaatattttacgtggttgaccattcttggtggtaaaataatctcttagtgttggaatggaatactgtttaatgtttccacattcatcgtatattttgacgtatgcagtcacatcgtttacacaatagtcagactgtagttctatcatgcttcctacattagaaggaggaacagttttaaagtctcttggttttaatctattgccgtttttcatgaaatcctttgttttatccacttcacattttaaataaatgtccactatacattcttctgttaattttactagatcgtcatgggtcatagaatttataggttccgtagtccatggatccaaactagcaaacttcgcgtatacggtatctcgattagtgtatacaccaactgtatgaaaattaagaaaacagtttaatagatcgacagaaatatttaatcctccgtttgatacagatgcaccatatttatggatttcggattcacacgttgtttgtctgaggggttcgtctagcgttgcgtctacataaacttcgattccaatatattctttattgtcagaattacatatagatgtatcaccattatacactgtttctgaagttgttcgaacactaaatggtaggcacatcaaaatagtaaataataacaagtacatttctgcaatattgtatcgtacttggaaaattagtgttcgagtgagttggattatgtgagatttggattgtctatctttattttatgttttatattagaattgactgatatgacaagtttattccaatagattcttattaaaaacatatataataaataacaatggcggccgaatggcataaaattatcgaggatgtttcaaaaaataataagtttgaggatgccgccatcgtcgattacaagactaaaaagaatgttctagcagccattcctaacagaacatttgcaaagatcattccaggtgaagtaattgctctaatcactaatcgtaatattctaaaacctcgtataggtcaaaaattttttattgtatacactaactctctgatggatgagaacacatataccatggagttgcttactggatacgcaccagtatctccgattgttatagcgagaacacacaccgcactcatctttttgatgggtaagcctacgacatccagacgtgaagtttatagaacgtgcagagattatgccactaatgtgcgagcaactggtaattaatatgaaaaaataacattaattattaacgttaatttttaaatgatgaggaaatggagcatatccatattgactatatcaataattccggtattatcatacacctcatcgatttttagattacatttagacaatgaattggagttatgttatgggaaattacaatttgataagttgagtaatgtaaatataaaatacattcctgagtatattccatacagatataattttattaatagcacattaactgtggacgaagccaagaagtataatgttgtttttacacgtagttcatttttaaaatatagatacgctagtaatttagatactggtttggttgtcgcgttagccgtacacttaaaatataatgatgtgcgatgtttagtaaatgtatcatgtttcattaaaaatttgatgacacatacatctactatattaacatcaaagcatgtgacttattcgttgcgtcgatccaggtgtaatattataataggatacgattctatcatatggtataaagataatatatcagatcattataatgaagaattatattataacggtatctatgactttactgcaatatgcatgttaatagcatctacagtgatagtattagtatactttttaaaaagaataaaaatgaactatttgattactattattaaaaatggataaaatcaaaattacagttgattcaaaaatcggtagcgtggttaccatatcttacaacttggaaaagataacaattgacgtcgtccccaaaaaaagaaaaggagatagtgattgtcactgaagaagtggtaaaagatattatcgatattgttgatgacatggatatagagagtgtatcatgtgatctataaaaataggtattaatcaatactttttatttacggtactgcaccgattactttatactttttatttacggtactcttatgccatgacctacattattccctattttaaaaaaatattattctaattcttctagccatttcctagttcgttcaaatgctacatcgacgtcaaagataggcgagtagttgaaatctagttctgccttgttggtacgtacctcgaaggcggtattggatatcttcaacgtatatttgtttaatagagatgatttcctaaatagaattctcttaatatcattcttacatgcgtgcgtttttagtacccatcttggaaccctagatccttgttctattcccagtggtttcatcaatagaagattaaacatgtcatacgagcacgatggagagttatcgtagcaaaagtaagcatttcctttaatctcagatcccggatactggatatattttgcagccaacacgtgcatccatgcaacatttcctacatatacccggctatgcaccgcgccatcatcgactgtacgatacataatgttaccatgttgcttacattgcttgtaaaagactttcatcaatttgtctccttctccgtaaatttcagtgggtcttaggcaacaagtatacaattttgctccattcatgattacggaattattggctttcataaccagttgctcagccatacgtttactttttgcgtaaacatgtcctggtgatatatcataaagggtatgctcatggccgatgaatggatcaccgtgtttatttggtcctattgcttccatgctactagtatagatcaaatacttgattcctaggtccacacaagctgccaatatagtctgtgttccataatagtttactttcatgatttcattatcggtgtattttccaaatacatccactagggcggccgtatgaataatcagatttaccccatctagtgcctctctcaccttatcaaagtcgtttatatcacattgtatgtaatttataactttaaccttcgatgtgagcggttgtggatcttcttcgacatcgatgactctgatttcctgaacatcatctgcactaattagaagtttgacgatatacctgcctagaaatccggcaccaccagtaaccgcgtacacggccattgctcgccactcgtaatagcagactacttattctattttactaaataatggctgtttgtataatagaccacgataatatcagaggagttatttactttgaaccagtccatggaaaagataaagttttaggatcagttattggattaaaatccggaacgtatagtttgataattcatcgttacggagatattagtcgaggatgtgattccatagacagtccagaaatatttatcggtaacatctttgtaaacagatatggtgtagcatatgtttatttagatacagatgtaaatatatctacaattattggaaaggcgttatctatttcaaaaaatgatcagagattagcgtgtggagtcattggtatttctttcataaatgaaaagataatacattttcttacaattaacgagaatggcgtttgatatatcagttaatgcgtctaaaacaataaatgcattagtttacttttctactcagcaaaataaattagtcatacgtaatgaagttaatgatacacaatacactgttgaatttgatagggacaaagtagttgacacgtttatttcatataatagacatactgactccatagagataagaggggtgcttccagaggaaactaatattggttgcgcggttaatacgccggttagtatgacttacttgtataataagtatagttttaaactgattttagcagaatatataagacacagaaatactatatccggcaatatttattcggcattgatgacactagatgatttggctattaaacagtatggagacattgatctattatttaatgagaaacttaaagtagactccgattcgggactatttgactttgtcaactttgtaaaggatatgatatgttgtgattctagaatagtagtagctctatctagtctagtatctaaacattgggaattgacaaataaaaagtataggtgtatggcattagccgaacatatagctgatagtattccaatatctgagctatctagactacgatacaatctatgtaagtatctacgcggacacactgagagcatagaggatgaatttgattattttgaagacgatgattcgtctacatgttctgccgtaaccgacagggaaacggatgtataatttttttatagcgtgaaggatatgataaaaatataattattgtatccattccgattccaatcacattatatgattctgtaaaaaaattatactgtaacgcaatgaagtagtctcatagatgtatagaggtcagatactggtttgataaactttttattccacatgagtatgtttgactttatggttagacccgcatactttaacaaatcactgaaaattggagttaggtattgacctctcagaatcagttgccgttctggaacattaaatgtattttttatgatatactccagcgcatttatgttggcatacaacaagtcattactaatggaatattccaagagttttagttgtctagtatttaacaagagaagagatttcaacagactgtttatgaactcgaatgtcgcctcattgtcgcttatattgatgatgtcgaattctcccaatatcatcgccgatgagtagctcatcttgttatcgggatccaagttttctaaagatgtcattaaaccctcgatcatgaatggatttatcatcatcgtttttatgttggacatgagcttagtccgtttgtccacatctatagaagatgatttctgaattatttcatatatctctctctttaacaccaggaacttgtcaggatggtctactttaatatgttctcgtctaagagatgaaaatctttggatggtcgcatgtgacttttctctaaaggatgatgttgcacaagatcctctcttaaatgaatccatcttatccttggacaagatggacagtctattttccttagatggtttgatatttttattacccatgactataaaggtagacctaatcgtctcggatgacctatatatttattttcagttttattatacgcataaattgtaaaaaatatgttaggtttacgaaaatgtctcgtggggcattaatcgtttttgaaggattggacaaatctggaaaaacaacacaatgtatgaacatcatggaatcaataccttcaaacacaataaaataccttaactttcctcagagatccactgtcactggaaaaatgatagatgactatctaactcgtaaaaaaacctataatgatcatatagttaatctattattttgtgcaaatagatgggagtttgcatcttttatacaagaacaactagaacagggaattactttaatagttgatagatacgcgttctctggagtagcgtatgccgccgctaaaggcgcgccaatgactctgagtaagagttatgaatctggattgcctaaacccgacttagttatattcttggaatctggtagcaaagaaattaatagaaacgtcggcgaggaaatttatgaagatgttgaattccaacaaaaggtattacaagaatataaaaaaatgattgaagaaggagatattcattggcaaattatttcttctgaattcgaggaagatgtaaagaaggagttgatcaagaatatagttatagaggctatgcacacggttactggaccagtggggcaactgtggatgtaataaagtgaaattacattttttataaatagatgttagtacagtgttataaatggatgaagcatattactctggcaacttggaatcagtactcggatacgtgtacgatatgcataccgaactcgtatcaatatctcaattagttattgccaagatagaaactatagataatgatatattaaacaaggacattgtaaattttatcatgtgtagatcaaacttggataatccatttatctctttcctagatactgtatatactattatagatcaagagaactatcagactgagttgattaattcattagacgacaatgaaattatcgattgtatagttaacaagtttatgagcttttataaggataacctagaaaatatagtagagatgctatcattactctaaaatatataatgaataacccagattttaaaactacgtatgccgaagtactcggttccagaatagccgatatagatattaaacaagtgatacgtaagaatatactacaattgtctaatgatatccgcgaacgatatttgtgaaaaatattaaaaaaagatactttttttattaaatgacgtcgcttcgcgaatttagaaaattatgctgtgatatatatcacgcatcaggatataaagaaaaatctaaattaatcagagactttataacagatagagatgataccgatacatatttgatcattaagttattgcttcccggattagacgatagaatgtataacatgaacgataaacaaattataaaattatatagtatagtatttaaacaatctcaggaagatatgctacaagatttaggatacggatatataggagacactattaggactttcttcaaagagaacacagaaatccgtccacgagataaaagcattttaactttagaagaagtggatagttttttaactacgttatcatccgtaactaaagaatcgcatcaaataaaattattgactgatatagcatctgtttgtacatgtaatgatttaaaatgtgtagtcatgcttattgataaagatctaaaaattaaagcgggtcctcggtacgtacttaacgctattagtcctcatgcctatgatgtttttagaaaatctaataacttgaaagagataatagaaaatgcggctaaacaaaatctagactctatatctatttctgttatgactccaattaatcccatgttagcggaatcgtgtgattctgtcaataaggcgtttaaaaaatttccatcaggaatgtttgcggaagtcaaatacgatggtgaaagagtacaagttcataaaaaaaataacgagtttgccttctttagtagaaacatgaaaccagtactctctcataaagtggattatctcaaagaatacataccgaaagcatttaaaaaagctacgtctatcgtattggattctgaaattgttcttgtagacgaacataatgtaccgctaccgtttggaagtttaggtatacacaaaaagaaagaatataaaaactctaacatgtgtttgttcgtgtttgactgtttgcactttgatggattcgatatgacggacattccattgtacgaacgaagatcttttctcaaagatgttatggtcgaaatacccaatagaatagtattctcagagttgactaatattagtaacgagtctcagttaaccgatgtattggatgatgcactaacgagaaaattagaaggattggtcttaaaagatattaatggagtatacgaaccgggaaagagaagatggttaaaaataaagcgagactatttgaacgagggttccatggcagattctgccgatttagtagtactaggtgcttactatggtaaaggagcaaagggtggtatcatggcagtctttctaatgggttgttacgacgatgaatccggtaaatggaagacggtaactaaatgttccggccacgatgataatacgttaagggttttacaagaccaattaaagatggttaaaattaacaaggatcccaaaaaaattccagtgtggttggtagttaataaaatctatattcccgattttgtagtagaggatccaaaacaatctcagatatgggaaatttcaggagcagagtttacgtcttcaaagtcacatacagcaaatggaatatcgattagatttcctagatttactaggattagagaagataaaacgtggaaagaatctactcatctaaacgatttagtaaacttgactaaatcttaatagttacatacaaactgaaaattaaaataacactatttagttggtggtcgccatggatggcgttattgtatactgtctaaacgcgttagtaaaacatggcgaggaaataaatcatataaaaaatgatttcatgattaaaccatgttgtgaaagagtttgtgaaaaagtcaagaacgttcacatcgacggacaatctaaaaacaatacagtgattgcagatttgccatatctggataatgctgtatcggatgtatgcaaatcaatatataaaaagaatgtatcaagaatatccagatttgctaatttgataaagataggcgacgatgacaagactcctactggtgtatataattattttaaacctaaagatgccattcctgttattatatccataggaaaggataaagatgtttgtgaactattaatcgcatccgataaagcgtgtgcgtgcatagagttaaattcatataaagtagccattcttcccatgaatgtttccttctttaccaaaggaaatgcgtcattgattattctcctgtttgacttctctatcgacgcggcacctctcttaagaagtgtaaccgataataatgttgttatatctagacacaaacgtctacatgacgagcttccgagttccaattggttcaagttttacataaatatacagtccgactattgttctatattatatatggtagttgatggatctgtgatgtatgcaatagctgataatagaactcacgcaattattagcaaaaatatattagacaatactacgattaacgatgagtgtagatgctgttattttgaaccacagattaagattctcgatagagatgagatgctcaatggatcatcgtgtgatatgaacagacattgtattatgatgaatttacctgatgtaggcgaatttggatctagtatattggggaaatatgtacctgacatgattaagattgctctttcggtggctggtaatttaataagaaatcgagactacattcccgggagacgaggctataactactacgtttacggtatagcatctagataattttttttaagcacaaaataaaaaacataattttaaaccaatctatttcatactattttgtgcgatcaccatggacataaagatagatattagtatttctggtgataaatttacggtgactactagtagggaaaatgaagaaaaaaactactgatgttatcaaacctgattatcttgagtacgatgacttgttagatagagatgagatgtctactattctagaggaatattttatgtacagaggtctattaggcttcagaataaaatatggacgactctttaacgaaattagaaaattcgacaatgatgcggaagaacaattcggtactatagaagaactcaagcagaaacttagattaaattctgaagagggagccgataactttatagattatataaaggtacaaaacgacaggatatcgtcaaacttactgtgtacgattgcatatctatgataggattgtgtgcgtgtgtggtagatgtttggagaaaggagaaactgttttctagatggaaatattgtttacgagcaattaaactgtttattgatgatcacatgcttgataagataaaatctatactgtagaatagactagtgtatgcggaaatgtcatagaaagttaagttaatgagagcaaaaaattataatgttgtattctaatcccatatttattatttttttctgtaatagttagaaaaatacatttgatggtctatctaccagattattatgtgttataaggtactttttctcataataaactagagatgcgtaagatagtgtttttcaaaactataaatctaaaattgatggatgtgatatacagctattaatttcgaaaatatattttaatctgataactttaaacatggatttttgatggtggtttaaagtttaaaaaaatattttgttattgtagtatatgataatatcaaaaagatggatataaagaatttgctgactgtaagtactatttttacattactacattggctacggcagatatacctacttcgtcactgccacacgctccggtaaacgggtcatgtgacgagggagaatatcttgataaaggcataatcaatgttgtaatcagtgtccacctggagaatttgccaaggtcagatgtagtggcagtgataacacaaaatgtgaacgctgcctacctcatacatataccacaatccccaattattctaaatggatgtcatcaatgtagaaaatgcccaacaggatcatttgataaggtaaagtgtaccggaacacataacagtaaatgttcgtgtcttcctggttggtattgcgctactgattcttcacagactgaagattgtcgagattgtataccaaaaaggagatgtccgtgcggatattttggtggaatagatgaacaaggaaatcctatttgtaaatcgtgatgtattggtgaacattgcgactacctacataattatagagttggtccttttcctccatgtaaactatctaaatgtaattaattatgatcttgatataatatgattatcatgttaccatacattatatagctactttggtagtgtattattcagtatgaagacatattaataattacttatctttgaagatcttgttataatcataaatataaaaataaaaatacttatggggcatagtaactcataattgctgacacgataaattcgtaataatctgttttgttcaaatttttataaggaatctaggcataaaaataaaaacataatttataatacacttacaacacccatcatgaataacagcagtgaattaattgctgcgattaatggatttagaaatagtggacgattttgtgatattaatatagttattaatgatgaaaggataaatgctcatagactcatcctatctggagcatccgaatatttttccattctattttctagtgattttatcgattctaatgaatacgaagttaatctaagtcatttagattatcaaagtgtgaacgatttgatcgattacatttatgggatacctttgagcctaactaacgatagcgtgaaatatattctttcaactgctgattttttacaaattggatctgctattacggagtgtgaaaattacatacttaaaaatctctgttctagaaactgtatcgatttctacatatacgctgataaatataataacaagaaaatagaaacagcgtcgtttaacacaatattacgaaatattttgagactcattaacgatgaaaactttaaatacttgacagaggaatcaatgataaaaattttaagcgatgatatgttaaatataaaaaatgaggatttcgcaccactaattctcattaaatggttagagagtacacaacaaccatgcaccgtcgagttacttagatgcctcagaatatcattgctttccccacaagttataaaatcactttatagtcatcgactggttagttcaatctacgaatgtataacattcttaaacaatatagcattcttggatgaatcatttcctagatacaatagcatcgagttgatatctatcggtataagtaattcacgtgataagatttccataaactgctacaatcgtaaaaaaaatacatgggaaatgatatcttcacgtggatataggtgtagtttcgcagtggctgtcatggataatattatctatatgatgggtggatacgatcagtccccgtatagaagttcaaaggttatagcatacaatacatgtactaattcttggatatatgatataccagagctaaaatatccgcgttctaattgcggaggagttgtcgatgacgaatacatttattgtataggtggcatacgcgatcaggattcatcgttgatatctgatattgatagatggaagccatcaaaaccatattggcagacgtatgctaaaatgcgagagccaaaatgtgatatgggggttgcgatgttaaacggattaatatatgtcataggtggagtcgttaaaggtggcacatgtaccgacacactagagagtttatcagaagatggatggatgatgcatcgacgccttccaataaaaatgtccaatatgtcgacgattgttcatgctggaaagatttatatatctggaggttacaccaatagtagtatagttaatgaaatatctaatctagtccttagctataatccgatatatgatgaatggaccaaattatcatcattaaatattcctagaattaatcctgctctatggtcagtgcataataaattatatgtaggaggaatatccgatgatgttcaaactaatacatctgaaacatacgacaaagaaaaagattgttggacattggataatggtcacgtgttaccatacaattatataatgtataaatgcgaaccgattaaacataaatatccattggaaaaaatacagtacacgaatgattttctaaagtgtttggagagttttataggtagttgataaaacaaaatacataattttgtaaaaataaatcactttttatactaatatggcacgattgtcaatacttttgttactaatatcattagtatacgctacaccttatcctcagacacagatatctaaaaaaataggtgatgatgcaactatatcatgtagtcgaaataatacaactgactacgttgttatgagtgcttggtataaggagcccaattccattattctcttagctgccaaaagcgacgtcttgtattttgataattataccaaggataaaatatcttacgattctccatacgatgatctagttacaactatcacaattaaatcattgactgctggagatgccggtacttatgtatgtgcattctttatgacatcgactacaaatgacactgataaagtagattatgaagactactctacagagttgattgtaaatacagatagtgaatcgactatagacataatactatctggatctacacattcaccggaaactagttctgagaaacctgattatatagataattctaattgctcgtcggtattcgaaatcgcgactccggaaccaattactgataaagaagatcatacagtcacagacactgttgtatacactacagtaagtacatcatctggagttgttactactaaatcaaccaccgatgatgcggatctttatgatacgtacaatgataatgaatcatctactgtgttaccaacaactgtagaaagcatcacgaaatctataggtaagtatagtactaaagactttgcagaaatatttggtatcaccgcattaattatattgtctgccgtagcagttttctgtatcacatattatatatgtaataaacggtcacgtaaatacaaaacagagaacaaagtctagatttttgacttacataaatgtctgggatagtaaaatctatcatattgagcggaccatctggttcaggaaagacagccatagccaaaagactgttaaaagactatggaaatatatttggatttgtggtgtcccataccactagatttcctcgtcctatggaacgagaaggtgtcgattaccattacgttaacagagaggccatctggaagggaatagccgctggaaactttctataacatactgagtttttaggaaatatttacggaacttctaaaacagctgtgaatacagcggctattaataatcgtatttgtgtgatggatttaaacatcgacggtgttagaagtcttaaaaatacttacctaatgccttactcggtgtatataagacctacctctcttaaaatggttgagaccaagcttcgtcgtagaaacactgaagcggacgatgagattcatcgtcgtgcgatgttggcaaaacggatatggatgaggccaacgaagcagttctattcgacactattattattgaagatgatgtgaatttagcatatagtaagttaattcagatactacaggaccgtattagaatgtattttaacactaattaagatataatacttgactgacttaaaacttgataattaataatataattcgtttttatatgtgactatttcaacatctaatgtattagttaaatattaaacttaccacataaaacttaaaatttaaaatgatatttcattgacggatagatcacacattatgaactttcaaggacttgtgttaactgacaattgcaaaaatcaatgggtcgttggaccattaataggaaaaggtggattcggtagtatttatactactaatgacaataattatgtagtaaaaatagagcccaaagctaacggatcattatttaccgaacaggcattttatactagagtacttaaaccatccgttatcgaagaatggaaaaaatctcacaatataaagcacgtaggtcttatcacgtgcacggcatttggtctatacaaatccattaatgtggaatatcgattcttggtaattaatagattaggtgcagatctagatgcggtgatcagagccaataataatagactaccaaaaaggtcggtgatgttgatcggaatcgaaatcttaaataccatacaatttatgcacgagcaaggatattctcacggagatattaaagcgagcaatatagtcttggatcagatggataagaataaattatatctagtggattacggattggtttctaaattcatgtctaatggtgaacatgttccatttataagaaatccaaataaaatggataacggtactctagaatttacacctatagattcgcataaaggatacgttgtatcgagacgtggagatctagaaacacttggatattgtatgattagatggttgggaggtatcctgccatggactaagatgtctgaaacaaagaattgtgcattagtaagtgccacaaaacagaaatatgtgaacaatactgcgactttgttaatgaccagtttgcaatacgcacctaaagaattgctacaatatattactatggtaaactctttgacatattttgaggaacccaattacgacgagtttcggcgcgtattaatgaatggagttatgtaaaatttttgttgataaaaaattaaaaaataacttagttatatcactctcgcgagtgcaaccgaaaacatggcgatgttttacacacacgctttcggtgggtacgatgagaaccttcatgcatttcctggaatatcatcgacggtcgccaatgatgtcaggaaatattctgttgtgtcagtttataataaaaagtataagattgtaaaaaacaaatatatgtggtgttacagtcaggtgaacaagagatatattggagcactgctgcctatgtttgagtgcaatgaatatctacaaattggagatccaatccatgatcaagaaggaaatcaaatctctatcatcacatatcgccacaaaaactactatgctctaagcggaatcgggtacgagagtctagacttgtgtttggaaggagtagggattcatcatcacgtacttgaaacaggaaacgctgtatatggaaaagttcaacatgattattctactatcaaagagaaggccaaagaaatgagtgcacttagtccaggacctataattgattaccacgtctggataggagattgtatctgtcaagttactgctgtggacgtacatggaaaggaaattatgagaatgagattcaaaaaaggtgcggtgctacagatcccaaatctggtaaaagttaaacttggggagaatgatacagaaaatctttccactgccatatcagctctcctgaattccggcggtggcacaatcgaggtaacatctaaggaagaacgtgtggattatgtactcatgaaacgtttggaatctatacatcatctgtggtctgtagtgtatgatcatcttaatgttgtgaatggcaaagaacgctgttatgtgcatatgcattcatctaatcaacatcctataccgagtactgtaaaaacaaatttgtacatgaagactatgggatcatgtcttcaaatggactccatggaagctctagagtatcttagtgaactgaaggaatcaggtggacggagtcccagaccagaattgcagaaatttgaatatccagatggagtggaagacactgaatcaattgagagattggcagaggagttcttcaatagatcagaacttcaggctggtgaatcagtcaaatttggtaattctattaatgttaaacatacatctgtttcagctaagcaactaagaacacgtatacggcagcagcttccttctatactctcatcttttgccaacacagagggtggatatttgttcattggagttgataataatacacacaaagtaattggattcacggtgggtcacgactacctcagactggtagagaatgatatagaaaagcatatcaaaagacttcgtgttgtgcatttctgtgagaagaaagaggacatcaagtacgcgtgtcgattcatcaaggtatataaacctggggatgagactacctcgacatacatgtgtgctatcaaagtggaaagatgctgttgtgctgtgtttgcagattggccagaatcatggtatatggatactaatggtatcaagaagtattctccagatgaatgggtgtcatatataaaagtttaattaatgtaactatagagaaaataataggttgtatcatatagacaataactaacaattaattagtaactgttatctctttttaactaactaactaactaactatatacctattaataatacatcgtagttatagttcttaacatctattaatcattgattcgcttctttaattttttataaactaacattgttaattgaaaagggataacatgttacagaatataaattatatatggatttttttaaaaaggaaatacttgactggagtatatatttatctcttcattatatagcacgcgcgtgttccaattcttccacatcccatataatacaggattataatcttgttcgaacatacgagaaagtggataaaaaaatagttgattttttatctaggtggccaaatttattccatgtttcagaatatggggaaaatattctacatatttattctatggatgatgctaatgcgaatattataattttttttctagatagagtattaaatattaataagaaccgcgggtcatttatacataatctcgggttatcatccattaatataaaagaatatatatatcaatatcaattagttaataatgatcatctagataataggataagactaatgcttgaaaatggacgtagatcaagacattttttgtcctatatattagatacagttaatatctatatatgtattttaataaatcatggattttacatagatgctgaagacagttacggttgtacattattacatagatgtatatatcactataagaaatcagaatcacacaatgaattaattaagatgttgttaaataatggatcagatgtagataaaaaagatacgtacggaaacacaccgtttatcctattatgtaaacacgatatcgacaacgcggaattgtttgagatatgtttagagaatgctaatatagactctatggactttaatggatatacacctcttcattatgtctcgtgtcgcaataaatatgattttgtaaagtcattaatttctaaaggagcaaatgttaatgcgcgtaataaattcggaactactccattttattgtggaattatacacggtatctctcttataaagctatatttggaattagacatagcgttagaaatagataatgaacatatagttcgtcatttaataatttttgatgctattgaagctttggattatctattatccaaaggagttattgatattaactatcgtactatatacaacgaaacatctatttatgacgccgtcagttataatgcgtataatacgttggtctatctattaaacagaaatggtgattttgagacgattactactagtggatgtacatgtatttcggaagcagtcgcgaacaacaacaaaataataatggaagtactattgtctaaacgaccatctttgaaaattatgatacagtctatgatagcaattactaaacataaacaacataatgcagatttattgaaaatgtgtataaaatatactgcgtgtatgaccgattatgatactcttatagatgtacaatcgctacagcaatataaatggtatattttaaaatgtttcgatgaaatagatatcatgaagagatgttatataaaaaataaaactgtattccaattagttttttgtatcaaagacattaatactttaatgagatacggtagacatccttctttcgtgaaatgcgctagtctcgacgtatacggaagtcgtgtacgtaatatcatagcatctattagatatcgtcagagattaattagtctattatccaagaagctggatgcgggagataaatggtcgtgttttcctaacgaaataaaatataaaatattggaaaactttaacgataacgaactgtccacatatctaaaaaatcttataaacactattaaaatataaaatctaagtaggataaaatcacactacattattgtttccttttagtactcgacagtgtatactatttttaacactcataaataaaaatgaaaacgatttccgttgttacgttgttatgcgtactaccggctgttgtttattcaacatgtactgtacccactatgaataacgctaaattaacgtctaccgaaacatcgtttaatgataaacataaagttacgtttacatgtgatcagggatatcattctttggatccaaacgctgtctgtgaaacagataaatggaaatacgaaaatccatgcaagaaaatgtgcacagtttctgattatgtctctgaactatatgataagccattatacgaagtgaattccaccatgacactacgttgcaacagcgaaacaaaatattttcgttgcgaagaaaaaaatggaaatacttcttggaatgatactgttacgtgtcctaatgcggaatgtcaacctcttcgattagaacacggatcgtgtcaaccagttaaagaaaaatactcatttggggaatatatgactatcaactgtgatgttggatatgaggttattggtgcttcgtacataagttgtacagctaattcttggaatgttattccatcatgtcaacaaaaatgtgatataccgtctctatctaatggattaatttccggatctacattttctatcggtggcgttatacatcttagttgtaaaagtggttttacactaacggggtctccatcatccacatgtattgacggtaaatggaatcccatactcccgacatgtgtacgatctaacgaagaatttgatccgatagatgatgatcccgatgacgagacagatctgagcaagatctcgaaagacgttgtacaatatgaacaagaaatagaatcgttagaagcaacttatcatataatcatagtagcgttgacaattatgggtgttatatttttaatctccattatagtattagtttgttcctgtgacaaaactaatgaccaatataagttccataaattgctgccgtgaatatgaatacgttaaaaattaatgaataattaataattaataattaataattaattaattaataattaataattaataataaataataaataataaataataaataacgaacaagtatcaaaagattaaagaattgctagaatcaattgagatgtcttcttcagtggatgttgatatctacgatgccgttagagcatttttactcaggcactattgtgacaagagatttattgtgtatggaagaagtaacgccatattacataatatatacaggctatttacaagacgcgctattataccgttcgatgatgtagtacgtactatgccaaatgaatcacgtgttaaacaatgggtgatcgatacacttaatgatataatgacgaaggaacacgatgtttctgtaagcgtcagcaccggaatactattcatggaaatgtttttcgattacaataaaaataattccaaaaatagtatcaacaatcaactaatgtatgatataattaatagcgtatctataattctagctaatgagagatatagaagcgcttttaacgacgatggtatatacatccgtagaactatgattgacaagttgtacgaatacgcatctctaactactattggtatgattactggaggtatttgttattatctgttgatgcatctagttagtttgtataaataattatttcaatatactagttaaaattttaagatttttaaatgtataaaaaactaataacgtttttatttgtaataggtgcagtagcatcttattcgaataatgagtacactccgtttaataaacttagtgtaaaactgtatatagatggagtagataatatagaaaattcatatactgataataatgaattggtgttaaattttaaagagtacacaatttctattattacagagtcatgcgacgtcggatttgattccatagatatagatgttataaacgactataaaattcttgatatgtataccattgactcgtctaccattcaacgcagaggtcacacatgcaaaatatctaccaaattatcatgccattatgataagcacccttatattcacaaatatgagggtgatgagcgacaatattctattactgcagagggaaaatgctataaaggaataaaatatgaaataagtatgatgcacgatgatacgctattgagaaaacatactcttaaaattggatctacttatatattcgatcgccatggacatagtaatacatattattcaaaatatgatttttaaaaatttaaaatatattatcccttcagtgaccgtagtcaaataacaaacaacaccatgagagctataattctcacagttttgttcattaatagtataaatgctacaataactagttataagtttgaatccgtcaattttgattccaaaattgaatggactgggaatggtctatacaatatatcccttagaaattatggaataaagacgtggcaaacgatgtatacaaatgtaccagagggaacatacgacatatccggatttccaaataatgatttcgtatctttctgggttaaatttgaacaaggcgattataaagtggacaagtattgtacgggactatgcatcgaagtaaaaattggaccaccgactgtaacattgactgaatacgacgaccatatcaatttgtacatcgagcatccgtatgccactagaggtagcaagaagattcctatttataaacgcaatgacatgtgtgatatctacttgttgtatacggctaacttcacattcggagactctgaagaaccagtaatatatgatattgatgactacgattgtacgtctacaggttgcagtatagactttgccacaacagaaaaagtgtgtgttatggcacagggagccacagaagggcttcttgataaaattacgccatggagttcggaagtatgtctgacacctaaaaagaatgtatatacatgcgcaattagatccaaagaagatgttcccaatttcaaggaaaaaatgaccagagttatcaagagaaaatttaataaacagtcacactcgtatttgaccaaatttctcggtagtacatcaaatgatattacaacttttcttagcatgcttgactaaatattcataatgaactctctaaactatttttatcaaaaaataaaacaatcactagtattaattttgataacgtagcataatcaacataacctcatcatctattaactgataacggttagttataatagggataaaggattaatgattatttctaaacatggttcggagcttgaaacagaattcatgctctcccttaaaacggatatcgttgataaattcgaaacagtatatttaaacaaaaatatatatcattggaggcgttaaacagaatggagaatcgtctgatcaaatattgagcgtcgatctatcgacaaaaagattaacaatagagccatctcttaacgataaaagaataggagccgctgcagcagtcataaatggacgcatttatgttattggtggacgagatggatcaaattatctaaacactgtagaaagttggaaacctattgataacaagtggagatacgaaacaccgataaattataaaagaagcagtgattccgctgtttcagttaataatactattttcgtaactggtggattatccataaataattccaataatacaattgtgattaataacatggaaaaacttaaacttaacgtttatgaagacaaacaaacaatggtcgattatagaaatgcctatggctagggtatatcacggtatcgactcgacatttggaatgttatattttgccggaggtctatccgttaccgaacaatatggtaatttagagaaaaacaacgagatatcttgttacaatcctagaacgaataagtggtttgatatttcatatactaattataagagatccgtatcatcattgtgtaaactaaataacgtcttctatgtatttagtaaggacattggatatgtggaaaagtatgatggtgcatggaagttagacatgatagtctcccagctataaaggcattttccacttctccttattgattgaaaatgaaaatatacatagttttttacgcatagcagtatctcaccctatagttttattgcttctaacatggatacagatgttacagatacagatacagatacagatacagatacagatacagatgttacaaatgtagaagatatcatgaatgaaatagatagagagaaagaagaaatactaaaaaatgtagaaatggaaaataataaaaatattaacaagaatcatcccagcaaatatattagagaagcgctcgttattaataccagtagtaatagtgattccattgataaagaagttatagaatgtattagtcaggatgtaggaatatagatcatatatactaatttttataatcgatacaaaacataaaaacaactcgttattacatagcaggcatggaatccttcaagtattgttttgataacgatggcaataaatggattattggaaacactttatattctggtaattcgatactctataaggtcagaaaaaatttcactagttcgttctacaattacgtaatgaagatagatcacaaatcacacaggccattattgtctgaaatacggttctatatatctgtattggatcctttgactatcgacaactggaaaagggaacgcggtataaagtatttggctattccatacttgtatggaattggagaaactgacgactataggttctttgttataaagaatttgggaagagtattcgctgctccaaaggatacggaatcagtattcgatgcatgcgtcactatgataaacacgttagagtttatacactctcgaggatttacccatggaaaaatagaacctaggaatatactgattagaaataaacgtctttcactaattgactattctagaactaacaaactctacaagagtggagatggatattcacatatagattacaacgaggacgtgataacttcaggaaatatcaattatatgagtgtagacaatcatctcggagccacagtttcgagacgaggagatttagaaatgttgggatattgcatgatagaatggttcggtggcaaacttccatggaaaaacgaaagtggtatgaaagcaatacaacagaaaagagaatataaaaaatttatagctactttctttgaggactgttttccggaaggaaatgaacctctggaattagttagatatatagaattagtatacacgttagattattctcaaactcctaattatgacagactacgtagactgtttatacaagattgaaattatattctttttttatagggcgttgtgatagttacggatatcttaatatttagactatctctgtcactacacgaccaaatcgattactatggatatcttcagggagatcgcatcttctatgaaaggagagaacgtattcatttcttcagcgtcaatctcgtcagtattgacaatattgtattatggagctaacggatccactgctgaacagctatcaaaatatgtagaaaaggaggagaacaatgatacggttaatgctcagtgtatctcattcaaatccatgaataaagtatatgggagatattctgccatgtttaaagattcctttttgagaaaaattggcgataatttccaaactgttgacttcactgattgtcgcactatagatgctatcaataagtgtgttgatatttttactgaggggaaaatcaatccactattgactgaacaattgtctccagatacccgtctcctagcaattagtgccgtatactttaaagcaaaatggttgatgccattcgaaaaggaattcaccagtgattatccattttacgtatcaccaacggaaatggtagacgtaagtatgatgtctatgtacggcgagccatttaatcacgcatctgtaaaagaatcattcggcaacttttcaatcatagaactaccatatgttggagatactagtatgatggtaattcttccagacaagattgatggattagaatccatagaacaaaatctaacagatacaaattttaagaaatggtgtaactctctggaagctacgtttatcgatgtacacattcccaagtttaaggtaacaggctcgtataatctggtggatactctagtaaagttgggactgacagatgtattctgttcaactggagattatagcaatatgtgtaattcagatgtgagtgtcgacgctatgatccacaaaacgtatatagatgtcaatgaagagtatacagaagcagctgcagcaacttgtgcactggtgtcagactgtgcatcaacagttacaaatgagttctgtgcagatcatccgttcatctatgtgattaggcatgttgatggcaaaattcttttcgttggtagatattgctctccaacaactaattaagcacattcttaaatagaatattatatagttaagattgttactaactggttaacattttttaaaaaatagaaaaaacatatgacattagcgcaggtcgttattcttccaattgcaattggtaagatgacggccaactttagtacccacgtcttttcaccacagcactgtggatgtgatagactgaccagtattgatgacgtcagacaatgtttgactgaatatatttattggtcttcctatgcataccgcaacaggcaatgtgctggacaattgtattcaacgctcctctcttttagagatgatgctgaatcagtgttcatcgacattcgcgagctggtgaaaaatatgccgtgggatgatgtcaaagattgtgcagaaatcatccgttgttatataccggatgagcaaaaaaccatcagagagatttcgtctatcatcggactttgtgcatatgctgctacttactggggaggtgaagaccatcctactagtaacagtctgaatgcattgtttgtgatgctcgagctgctcaattacgtggattataacatcatattccggcgtatgaattgattgatttcgtacatcttgacttcagctcttcccctcccctctttccccattccccagaaacgcttttttacccactataaaataaaatgagtgcattattgactattctattgcctatatttttttattcttcattcattcatacttttaacaatattgaatgtatcgacaacgggctatattttacatcattcatggagttagaaaaagagccggtaatcctgccatgccctcaaataaacaccctgtcgtcaggatataatgtattagatattatatgggaaaaacgaggagctgataatgataacattataccgatagataatggtaccaatatgctaattctgaatccgacacaaactgactctggtatctatatatgtattaccaagaacgagacctactgcgatatgatgtcactgaatttgacaatcgtgaccgatacagaatcaaatatagatcttatctcgtatccacaaatagtaaatgaacgatctacaggtgaaatggtatgtcccaatattaatgcatttattgctagaaataaagacgtggatgttgatgttatatggagaggacatccacgactcagaaataagagacttacacaacgaccaattggaattattactatagaagatgttagaaaaaatgatgctggttattacacatgtgttttaaaatatacatacagggataagacatatgaagtaactagaattgtaaaattagaggtacgggatagaatcatacctcctactatgcaattaccagtagtcgttatgacttcactaggtagtaatttaactattgcgtgtagagtatcgttgagacctcccacaattgatgcagatgtcttttggataagtaataatgagtattacgaagaagatgatgaggatagcgacggtagaagtgtaacaaatagaatctttacgattgataaaagacgtgttattacatcgcggttaaacattaatcccgtaaaggaagacgatgctacaacgtttacatgtatggcgtttactgtacataatagtattagcaaaacagttactattagcataaagtgattacactaccatcttatttcattctatttcgggttaacagtttataaaaaatttttatttattatcatcaagcaaacaattaacgaacgtattgctgtgattaactcccacaatactatgcatagtattgatcattaacttgcagaacagtcctagtactattttaacgtaatcgtgttcttgtgtaattgcagtatctatattataaaagtacgtaaacctagctatagttttattttttaattttagataatagacagtctccttatttttaaaaattgttacatcctttattaaatcatgaatggggacttctatggaatcattagtatgttgtgaacaacaagagcagacatcaataggaaatggtggaagacgatacactgttctatgtagttttaaaatacacatgaactttgaagaatttatataaatcattccatcgatacatccttctatattgacatgtatatatccaggaattcttttattaatgtcaggaaatgtataaactaaaacatttcccgggagcggagcttctaccggtgttatatcagtttttaacttacaaaatgtaaccaatacctttgcatgacttgttttgttcggtaacgttagtttaaacttgacgaatggattaattacaataacatgatccgcgcatctattaagtttttttactttaacacccttgtatgtttttacagagactttatctaaatttctagtgcttgtatgtgttataaatataacgggatatagaactgaatcacctaccttagatacccaattacattttatcagatccagataataaacaaattttgtcgccctaactaattctatattgttatatattttacaattggttatgatatcatgtaataacttggaatctaacgcgcatcgtcgtacgtttacacaattgtgatttagtgtagtatatctacacatgtatttttccgcactatagtattctggactagtgataaaactatcattatatcgatcttcgatgaactcatcgagatattgctctctgtcatattcatacacctgcataaactttctagacattttacaatctgtgttattttaggatcatatttacatatttacgatatatcaaagatgttagatatagttaatgggactcgtttataataatgaatattaaacaattaaacaattatatgagaactttatacccacaaagcatcataaaaatgagtcgtcgtccgatttatgtcttaaatatcaatcgcaattcaactcataaaatacaagagaatgaaatatatacatattttagttattgcaatatagaccatacgtctacagaacttaattttgtagttaaaaactatgatctaaacagacgacaacctgtaactgggtatactgcactacactgctatttgtataataattactttacaaacgatgtactgaagatattattaaatcatgacgtggatgtaacgatgaaaaccagtagcggacgtatgcctgtttatatattgcttactagatgttgcaatatttcacatgatgtagtgatagatatgatagccaaagataaaaaccacttatcacatagagactattccaacctactactagagtatataaaatctcgttacatgttattgaaggaagaggatattgatgagaacatagtatcaactttattagataagggaatcgatcctaactttaaacaagacggatataccgcgttacattattattatttgtgtctcgcacacatttataaaccaggtgagtgtagaaaaccgataacgataaaaaaggccaagcgaattatttctttgtttatacaacatggagctaatataaacgagttagataattgcggcaatacaccattccatttatatcttgtagttgaaacttgtaataatatccatatgactaaaatgctattgatttttaatccgaatttcgaaatacgtaataatcatggattaacgcctatactatcttatataacttccgactacatacaacatgatattcttgtcatgttaatacatcactatgaaacaaatgttggagaaatgccgatagatgagcgtcgcatgatcgtattcgaatttatcaaaacatattctacacatccatcagattcgataacttatttgatgaataggtttaaaaatatagatattcatacccgttatgaaggaaagacgttattacacgtagcatgtgaatacaataatacacacgtaatagattatcttatacgtatcaatggagatataaatgcgttaaccgacaataacaaacacgctatccaactcattatagataacaaagaaaattccccgtataccatcgattgtttattgtatatacttagatatattgtagataagaatgtgataagatcgttggtggatcaagttccatctctacctatcttcaatataaaatcatttgagaaattcatatcctactgtatacttttagatgacacattttatgatagacacgttcaaaatcgcgattctaaaacgtatcgatacacattttcaaaatacatgtcgtttgataaatacgatgatataataactaaatgtcatgaagaaacaatattgctcaaactatccactgttctagatactacactatatacagttttaagatgtcataattcgagaaagttaagaagatacctcaatgaattaaaaaaatatattaatgatacgtccttcaaaatatattctaatattatgaatgagagataccttaatgtatattataaatatatgtacgtgtcaaaagtatacaataaactatttcctgttttcacggataaaaattgtctactaacattactaccttcagaaattatatatgaaatattatacatgttgacaatttacgatctttataatatatcgtatccatctaccaaagtatagttgtatttttatcatgtgttatgtgtaaaaactgatattatataattatcttagtaccgtatgatgaaaatgacgatgaaaatgatggtccgtatatattttgtatcattatcattatcattatcattattgctattccatagctacgccatagacatcgaaaatgaaatcacagaattcttcaataaaatgagagatactctaccagctaaagactctaaatggttgaatccatcatgtatgtttggaggcacaatgaatgatatggccgctctaggagagccgttcagtgcaaagtgtccgcctattgaagacagtcttttatcgcatagatataacgataaagacaatgtggttaactgggagaagataggaaagactagacgacctcttaatagacgtgttaaaaacggtgacttatggatagccaactatacatctaacgacagtcatcgtaggtatttgtgtaccgtaaccacaaagaatggtgactgtgttcagggtatagtaagatctcatattagaaaacctccttcatgcattccagaaacatatgaactaggtactcatgataagtatggcatagacttatactgtggaattctttacgcgaaacattataataatataacttggtataaaaataatcaagaactcattatcgatggtactaagtattcacaatctggtcagaatttaattattcataatccagagttagaagatagtggaagatacgactgttacgttcattacgacgacgttagaatcaagaatgatatcgtagtatcaagatgtaaaatacttacggttataccgtcacaagaccacaggtttaaactaatactagatccgaaaatcaacgtaacgataggagaacctgccaatataacatgcactgctgtgtcgacgtcattattggtcgacgatgtactgattgattgggaaaatccatccggatggattataggattagattttggtgtatactctattttaactagtagtggcggtatcactgaggcgaccttgtactttgaaaatgttactgaagaatatataggcaatacatatacatgtcgtggacacaactattattttgataaaactcttacaactacagtagtattggagtaaatacacaatgcatttttatatacattactgaattattactgaattattattattattattattattattaattatatcgtattgtgctatagaatggatgaagatacgcgactatctagatatttgtatctcaccgatagagaacatataaatgtagactctattaaacagttgtgtaaaatatcagatcctaatgcatgttatagatgtggatgtacggctttacatgagtacttttataattatagatcagtcaacggaaaatacaagtatagatacaacggttactatcaatattattcatctagtgattatgaaaattataatgaatattattatgatgattatgatagaactggtatgaacagcgagagtgagagtgataatatatcaatcaaaacagaatatgagaatgaatatgaattctatgatgaaacacaagatcaaagtacacaactagtaggttacgacattaaactcaaaaccaatgaggttgattttgtggatgaattctatggctatgatagatcagtgagtgtccatgattatatagatgaatcaatcaattaataaagtagtatatggaagagagtctcacgtaagatggcgggatatatggcaagaacataatgatagcgtatacagtataggaaaggagtgcatagataatatatacgaagacaaccataccgtagacgaattctacaatatagacagcgtatcagatgtagatgacgcggaacacatatctcagataactaatgatgtatctacacaaacgggaaaaagaaatcagagttagatagatacatggaaatgtatcctcgtcatagatatagtaagcattctgtctttaagggattttctgacaaagttagaaaaaatgatttagacatgaatgtggtaaaagaattactttctaacggtgcatctctaacaatcaaggatagcagtaataaggatccaattgctgtttattttagaagaacgataatgaatttagaaatgattgatatcattaacaaacatacaactattgatgaacgccggtatatagtacactcctatctaaaaaattatagaaatttcgattatccatttttcaggaagttagttttgactaataaacatggtctcaacaattattataatgtaggtgatagcaaatatggaacaccgctacatatattggcgtctaataaaaaattaataactcctaattacatgaagttattagtgtataacggaaatgatataaacgcacgaggcgaagatacacaaatgcgaaccccattacacaaatatttgtgtaaatttgtatatcataatattgaatatgttgtccgatactacaatgaaaagattatagacgcatttatagaattaggagccgatctaactattccaaataacgatggactgataccagtaatttactgtattatagtaaatgccgaatatggttataacaatattactaacataaagataatacgtaaactacttaatcttagcagacatgctccacataatctatttagagatcgagtcatgcacgattatataagtaatacatatattgatcttgagtgtttagatattattagatcgttggatggattcgatatcaatggttactttgaaggacgtacaccacttcattgcgctatacaacataacttcactcagattgcggaatacttattagatcgaggagctgatatatcattaaagacagactatggcaaaactgtatttgatttatcattatgtagttacatccctcttaaatggactagctttttgattagtcgtctaccgcctaaaagtgtcatatgctcactgactaaccatataatagattatgttcttacgaacaatagacctattatttggcagagtcaaatgattaataagtacgtgctgttactggatccatccttttattctagattcagaaatgctatcgaaagcaaattaaatcaatacaataatcgttataataggttcgaacacgatagagatcatgttaatgaaaagtatgaaaaactcttacatgacatcgacatatatatcaaggatgtacaagtattaaaatctatttccatcactaataatataacactatacgacactattataaataataagtcagtgtttcctatacgtcgcacaaacgacaaacaattaattaataaaataaaataaaataaaatccaatatatattataatcttatcgaaaaagttattaaaaattcattagagaaatgtactctaactaatgccgttctcgagtatatgatctcatctcgatctcaatcatcttatttgagtcgtattcctaatgagatattactcgaaatattatataaactcgacatgtacgatttacgtaatctatatacaagatatatgcgagagaatgatatcgcagagtatcatatagagaatgcgaggtcgatttctacacagactgatgaatgattatatactacatagtttataacatttggtatctataacactagtttttataagtcattatggcatttgtaatattgaaatcgtaatttgagatatagtgcacgatggatattgatgatattaaacataatagacgagtagtaagtaacattagcagtcttttagacaatgatatattatgtgatgtaattataactattggagatggagaagaaattaaagcgcataaaactatattggctgccggatctaaatattttagaacactgtttacaacacctatgataataagagatctagtaactagagtaaatctacagatgttcgataaagatgctgtcaaaaatattgtacaatacttatacaataggcatataagttctatgaatgtaatagacgtattaaaatgcgccgactatcttctaatcgatgatctagtaactgactgtgaatcttatgttaaggattatactaatcatgatacctgtatatatatttatcataggttgtatgagatgtctcatattccaatagtcaaatatgttaaacgtatggtgatgcgtaatataccaacattgataactacggatgcatttaaaaacgcagtattcgaaatattactcgatattatttctaccaacgatggtgagtatgtatacagagaaggatataaagtgacgatactattgaagtggctagattacaactacatcactgaagaacagctgttgtgtatactgtcctgtatagatatacaaaatctagataagaaatctagactactactctattcgaatacaactataaatatgtattcttcgtgtgtgaaatttctattagacaataaacagaatagaaacattataccccgtcagttatgtttagtatatcatgatactaactacaatataagtaacccatgtatattagtatataatattaatactatggaatacaataccatttacaccattcataataacataattaattactcatcagctgttgtcgataatgaaataataatagctggaggatataactttaacaatatatcattgaacaaggtatataaaataaatatcgaacacagaacatgtgtagaactcccacccatgataaagaatagatgtcatttttcactggctgtaatcgatgacatgatttatgctataggtggtcaaaacggtacaatagtggaacgaagcgtagaatgttatacaatgggcgatgatacgtggaagatgttacctgatatgcccgatgcaatatcgagctacggcatgtgtgtattcgatcaatacatatacattataggtggtcgtacagaacacgtcaaatatatacctgtacaacacatgaatgaaatagtagatataaacgaacattcttcagataaagttatacgatacgacactgtcaataatatatgggagaagttaccgaacttatgtagtggaaccataagaccaagcgttgtttcacataaagatgatatatatgttgtatgtgacatcaaagatgatgaaataaatggttttaagacttgtatatttagatataacacgaaggataattataaaggatgggaattgataacgactatagacagtaaattaaccgttttacatactattcttcacgacgatgccataacgatactacattggtatgaatcgtgtatgatacaagataaatttaatatcgacacctacaaatggactaatatatgttatcaacgttcgaatagttatatagtacacgatacactacccatctactaaataaaatacctcattatgagtttattatagacgactacccagattcatttcttatctaactatgacattcatacatatcagtattcattcttattcttatcgtctttagatgcttacataaaatgatattaaccatctattaaatgatttttatgcgtgtattattacttagtaatagtaatgtgagttgagttagttctgtccgaaaatgaattagtgtacaaactcaaatataaactgaagtttaaccttgtttttatgtctacttggcatgttgtcattgttgtctatactaacatggatatctttaaagaactaattttgaaatacaatgatgagaatgttttgatttctccagtttccattttatctactttatctattctacatcatggtgcagctggttctacagctgaacaactatcaaaatatatagagaatgtaaatgagaatgtatcagaggataaggatgacaataatgatgacatggacgtagatattccgtattgtgcgacactagctacagcaaataaaatatacggtagcgatagtatcgagttccatgcctccttcctacaaaaaataaaagacgattttcaaactgtaaactttaataatgctaaccaaacaaaggaactaatcaatgaatgggttaagacgatgacaaatggtaaaattaattccttattgactagtccactgcccattaatactcgcatggcagttgttagcgccgtccattttaaagcaatgtggaaatatccattttctaaacatcttacatatacagacaagttttatatttctaagaatatagttaccagtgttgatatgatggtgagtactgaaaatgacttacaatatgtacatattaatgaattattcggaggattctctattatcgatattccatacgagggaaactctagtatggtgattatactaccggacgacatagaaggtatatataacatagaaaaaaatataacagatgaaaattttaaaaaatggtgtggtatgttatctactaaaagtatagacttgtatatgccaaagtttaaagtggaaatgacagaaccgtataatctggtaccgattctagaaaatttaggacttactaatatattcggatattatgcagattttagcaagatgtgtaatgaaactatcactgtagaaaattttctacatacgacgtttatagatgttaatgaggagtatacagaagcatcggccgttacaggagtatttatgactaacttttcgatggtatatcgtacgaaggtctacataaaccatccattcatgtacatgattaaagacaatacaggacgtatactttttatagggaaatactgctatccacaataaatataaacaaatagacttttatcacgtttatctatgtctaaatattacaaatagtaatagcatacactaaacttaaaaataatatcatttactaactaatatagtataaactaaaaaattaaacaatatcattattataagtaataccaaaatgatgatatacggattaatactgtcttatattcgtgtcttcatccatcgctagtccactttacattcccgttattccacccatttcggaagataaatcgttcaatagtgtagaggtattagtttccttgtttagagatgaccaaaaagactatacggtaacttctcagttcaataactacactatcgataccaaagactggactatcaacgtactatccacacctgatggtctggagataccattgactaatataactattggtcacggtttccaactataggtcgtgcattgttcaaatcagagtccgaggatatcttccaaaagaatatgagtattataggtgtctctatagaatgtaagaagccatctacattacttactttttgaccgtgcgtaaaatgactcgagtatttaatagatttccagatatggcttattacagaggaaactgtctagaagccgtttatgtaacaatgacttataaaaatactaaactggagagactgattacacttacctctctaatggtggattgcctgaatactatcggttgatgagtaatggagtggatggttgattattgattagttttccttattctttttattcacacaaaaagaacatttttataaacatgaaaccactgtctaaatgtaattatgatattgatttatagatgaagatcagccttcaggaggattttaaccagtatgtttaatatgaaaaaataaacataacatattttgagattaagcgctattgtgattaaattattttgctctataaactgaatatatagccacaattattgacgggcttgtttatgaccggcaatcatgaatttacagaaattatctctggctatatatcttactgcgacatgttcgtggtgttatgaaacatgtatgagaaaaactgcgttgtttcatgacaacaatttagagcatgtagaagagaatcacgatagtggtgtagcgtcgctgccgtacaagtatctacaagtagtccatcaaagagaacgtagtagattgttggctacatttaattggacatctatagctgaggaggttaaaaatgagttcattaaaatatgtgatatcaacggaacatatatctataattatactattactgttagtatgattattgattccacggaagaactaccaacagttactccatttacaacatatgaaccgtctacctataattatactttcgataatagcactgttagtactaccgaagaactaaaagtgactccatcaccaactccatatgcgactgtaacaactcctcttccaacatcatcagttccatatgatcaacgatcgaataacaatgtaagtattatatctattcagatactaagtaaaatattgggagtcaatgaaacagaattaactaactatcttattacgcataaaaatgccatggttgacaataacacgattaataataacatcactgtcaacagtactacagtctatgatgatacatctgataataacacattgcatggtaacataggatttttggaaataaataattgctacaatgtctctgtatcagatgctagttttagaataacattagtaaacgatagttctgaagaaattgttctaatgctaacagggactagttcatccgacaccttcatatcttccaccaatatcactgaatgtttgaaaacattaatcaataatacgtcgaatattagcgacgtaagtataacacaaaatatgaatgtaacatctaattgtgataaatgctcaatgaatttgatgacatccgttattcctgttgttaatgaatttaacaatacgttggaaaaaattggtgtaaaagatgataaaaacaatacagtacataactattataattgtaaactaactacaaattctacgtgtgatgagttaatcaatttagatgaagtcattaacaacataactctgacaaatattataagtagtagtgcttcgacaatcaacaacagaaaaagacgagatctgaatggagagtttgaattttctacgtccaaggaattagattgtctgtacgaagcatatggtgtaaacgaggatataagtcattgttttgcatcgcctagacatagacgatccgacgacaaacaggagttcatagaaatgaaattactcgaccatgcgaaaaaagatttaagcatagacagtgttattcctagaggtacaactcattttcaagtaggtgcatctggagcaagtggtggtgttgtaggagatagtaacccatttcaaaatgttaaatcacgggctagtctattggcagaaaaaataatgcctagagtacctactactgctaccgaagaccagctatatgcaactataaatagacaagccaagttgcctgcaggtgttaaaagtactccatttacagaggcggttgtgtctacgataaaccaaaagctttctagtgttaaagaggtaacttatgcttctctcaatctaccaaaatcaagtggctatattcatagaccatctgaatctgttatttacagaactataagacggacacgtttacctagtgatagcgatagtgattttgaggatatacaaactgttgttaaggaatataatgaaagatatggtagacgagtaagtagaacacagtcatcaagtagcagtgattttgaaaatatagatgaggtggttgcagaatataaacaaaaatatggtggagcagctagcagggttagaacatcgtcatcaagtagtagtgattttgaaaatatagatgaggtggttgcagaatataatcaaaaatatggcaacgccatgacaaaaggacgtggttctcttaaaccggatccgttatatagtactgttaagaaaacacctaaaagtatagcatccggagtagacatagtttcaaaacaaacagactattctctattacctggtgtgaatacaggcagttctattgtgacgcctctcaccagaagaggagctactagacgacctaaacgcccatctacacctccacgcgaagatctaccaccgcttcctccgaatcctcctcatcgacaacttcctcgtggtggcgatcattctctaccacaagttcctcaacgtgattattctccaccacgtagacctcctccaccacttcctcctaaaccagttccagctattccacctagagatggtcaaccagataataaaggatttagtaagtttgtatcccctagacggtgtagaagatcaacctctggagtcttatgtggtatgatacaatcaagaccaaacgatgatgtatattcacttcttcaacgaccaaaaattgaaccagaatatgcggagatcggtaatggcttacccaagaacaatgttcctgtgataggcaagaaacatagtaaaaaatataaatcatcaatgacaaaaatatcaacaaaatttgataaatctatggcatttggaaccgcaatgttactaactggtcaacaggctattaaccaacaggttagatcaactgcgttgattagaaaagatcagatgagcaaggacgaaaagatattcgaagcagttacaatgactctatcaactataggttcaacgttgacaactgcaggtatgatatctccaccactaatgattgctggaatgggtatatcgcttatatcaggtataatagatacggtaaaagatatatattacctgttttcaggacatgagaagccggtagatccagttattaagttttttaatacatacgctggattagtatccgatagtagtaaaatgggtgtaaggaaatgtttgacgcctggagaagacacacttatttacatcgcatatagaaacgataccagttttaaacagaatacggaggcaatggctttgtatttcttagatgttatcgattcagagatcctatatctaaacacatcaaatttagttctagagtatcaactaaaggtggcttgtccaataggaacattaagatctgtagatgttgacataactgcttatacaatattatatgatacagcggataatattaagaaatacaagtttgtcagattggcaacgctactatccaaacatccagttattagattgacatgtggtttagcagcaacattggtaattaaaccgtacgaggtacccatcagtgatatgcaactactaaaaatggcgacgcatggtgaaccagaatcaactaaatctataccatctgatgtctgtgataagtatcctctaaagaaattctatcttttggcaggtggttgtccctatgacacatctcaaacttttattgtacatactacttgcagtattctactaagaacagctacatgggatcagtttagaaaccgatgggtgttacaaaatccatttaggcaagaagggacatataagcaactgtttacctttagcaaatacgattttaatgacaccataatagatcctaatggtgtggcgggtcatgctagcttttgtaccaatagaagcagcaaccaatgtttctggtccgaacctatgatattggaagacgtgtcatcatgcagttctagaactagaaaaatatacgtaaaactgggaatatttaatgctgaagggtttaatagttttgtactaaattgtccaactgggtctacaccgacatacatcaaagataaaaatgcggacagtaacaatgttatcatagagctacctgtaggtgattacggcactgccaaattgtattcggcaacaaaacagtcaaggatagctgtgttctgcacacataactatgataaacgattcaaatcagatattattgttctaatatttaatagtatcagtgatattcgattttcgagcatatacactggagacgtgaacggtagaaatagactgtttatcacattgtctagaggaatgccatatagatcaatgtattgcgataacagacgaccaggttgttattatgcaggaataccatttaatgaaaatagtgtagaatcagatctgcattatggaccagaaataatgcttaaggaaacatatgacgcaaacagtattgatccacgagttataacaaagtcaaagacacactttcctactccaataagtgtaaaattcatggttgccaatttaggaaatgggtataacaaacccgaaaatttttggaacgacgctaaaagtaagaaaaggacatatagcgcaatgacaataaaaatcctaccatgtacagtgagaaataaaaatgtaaactttggatataactatggacatattatttctaatatggtttatgcacaatctactagttatgattatggtgatggtaccaactatacatttaaatctgtaaatagatcagatcatgagtgtgaatctattttagatttgaaggctaaggaagtaactgtgacgtgtcccgcgtttagtataccaagaaatatatcagcgtatgaaggtctatgctttagtgtcactacatctaaagatcattgtgccacagataataattggttaaaatctcatggttatggaaaggcagatgctattaaacaacgtgcctgttttcatcattggaattatgttacaacgtcgttggattattactgttcggcagaaaatgtttttaaaagctactggccggactatgatccatgtaagtcatatattcatatagaatatagagacatatggatagaatctaacgtgttacagcaacctccttacacattcgaattcactcatgacaattctaacgaatatgtggataaagaaattagtaacaaattaaatgatctgtacaatgaatacaagaagattatggaatatagcgacggatcattgccggcgtctataaacagattagcaaaggcattgacttcagagggtagagaaatagcaagtgttaatatagatggtaatctgttagatattgcatatcaagcagataaggaaaagatggctgagatacagaacaaaataaatgatatcaccagagatttatttatacacactctatcagacaaagatataaaagacattatagaatccgaagaaggtaagagatgttgtataatagatgttaagaacaatcgtgttgaaaagtactatcctattgataattatctatgtggtactttagatgattatatatacacctctgtagagactaacaaatcttatgtgttagtaaacgacacttatatgagctatgactatcttgaatcatcaggtgtagttgttttatcatgttatgaaatgactataatctccttggatacaaaagatgccaaagatgctatagaagatgagatagtagcaagtgctgtagcagaagcattgaatgacatgtttaaggaattcgataaaaacgtaagtgttattataataaaagaagaagataattatctaaacagttcgtcagatatctacaatatattatatatcatatgtggcgctattctgctactgttagtcattattttgatattggcaatttatatagcgcgcaataaatatagaaccaggaaatataaaatgatgaaggattacgacaataggagcattaaatctgagcatcataatagtcttgaaacagtatctatggaaattatggataatcggtactaataaaatagtttaacgcttttagaaccagtttggtactggaagttcagttcattactagttgagaatattgatgatttttttaaaatgatatttacgtttacatgcttgcatcacagaatgatatattcacaagtattattaaaaatgagtatcgatagttacattaccatatcatccatgctcatgtggatctctattcattatataatcaatgataaatgttattagaatactttccgaataagtcttctaaatattgtattaattatgaaaaactatgctacgcgattatgatgcaacgatgtttaatgatacgatagattttataactagcgagatgtcatcagaatcatttatcataactatgtttaataataattcatcaacgaatatagataacatgtgttatttatactttgaatacttcgaagtctgtccatcttctctattatttagacactgtttatagaatgctgtgatataaacaaactactagaatctgggacaactctattacactgttatctaatgaatgaaagatttgaatcatctgttttaaaaaacctagtaaaggagtatggcatgaatacgtttaatgttcgtgattagtgatggacacattccgttacacaaatatctaactcatgataaagttgagaatgatatctttgatatgctttctgataaactactacgtgctatataagttgttgagaaaaggagcagacactaattatgcagatgatagaggtaatacttttcttcattacttctgcgtctatatgtccacttataataagatgccattcaataagatgcatcgtgaaaagaaatttattaaagagttggtaaaatatggagctgatattaataaagtaaataatagaggaaatacacctctacacttctacatatcacaatatgatcacagtcctcgtataatatttactcttttatcattgggagctgacttgacaatacaaaaacaatgttcgtctaactcccataatggaatatataaaatgtgaagatatagaatacaatactcttttaatgttaattaattggtacgagtcaaatacagaaaactagaaaagaaagaaggtcggcatctccttatatctatctattcataaggataatgatagtaatgaccttaatatactatcctatttactaaagaagtttgacataaaaacgatgaatactttaatgacgttatacctctacataatgcttatagcgtgcaacgttgatataatgtcttatctcgtatatattggatgtaatattaatctcccaactaacgataacaagagtatatttgatattatattagcacaaacagataataagctatatatagattgtattatctatcatcttataaaacacggactagatataacgttatccgtaatcaaaaaataattagtattattccgtattttccaaatgattactatgtaagatatataataacttattgcatcttaatgaacaacaatttcataaaagaatacaataatcaatgtttaaatcatacgtacgaagaactatttattgatttaataacattcgattatatagataatatcgttcagattgcgtcaatgatataaataggctcaaacaagaaaactattataatatattaagatatgaagatataaaatataaaatatacaatctagttaatgatatccatgttacaaacaagacttttcccatgtacatggacattatagagaattgtaacgtacacataaaacgtaaatataaactcataaatactgtcattgacaaaatatatagtatatcatcgtctgttgataataacaaactctcactattgcctccagaaatcatacgcgagataatatccaagttaagcgaatacgatttaaatactattttgtatggtcgtaaccatctaaaacattattataaatttaactagatattaatgatgaagatgacaccatcatatatcttgttggtatatatgttcgtagtcgtaagtggagatgttccgtatacacccattaatgggaaatgtaacggtacagactataacagtaataatctatgttgtaaacaatgcaatcctggaatgtatatgactcattcctgtaataccacttctaatacaaaatgtgacaagtgcccagatgacacctttacatccattcctaatcatagtcccgcgtgtctaagttgtcgaggcaaatgtagcagtaatcaagtagagactaaatcgtgtagtaacacacaggacagagtatgtgtctgtgcatccggatactactgcgaatttgaaggatcaaacggttgcaggctatgtgtaccacaaacaaagtgtggttctggttacggtgtatatggctactcatctaaaggagatgtaatatgtaaaaagtgtccgggtaatatagataaatgtgatctgtcctttaacagcatagatgtagaaattaatatgtatcctgttaacaagacctcttgtaattcgagtataggaagcagcagtaccatatcaacttccgagttaacaattactctaacacatgaggattgtactcctgtctttattggagattactattcagtcgttgataaactagcaacttcaggtttctttacaaacgataaagtacatcaagacctcacaacgcagtgcaagattaatctagaaatcaaatgtaattctggaagagaatctagacaactaacacccacgacgaaggtatactttatgcctcattcagaaacggtaactgtggtaggagactgtctctctaatctcgatgtctatatagtatatgccaatacggacgcgatatattccgacatggacgtcgtcgcgtatcatactagttatatactaaatgttgatcatattccaccaaatgattgtgaaagagattgagattaaatcgtctaacaaacaattagtttttatgacattaacatataataaataaattaatcattattgacttaacgatgacgaaagttatcatcatcttaggattcttgattattaatacaaattcattgtctatgaaatgtgaacaagaattaaagtgttgtaaactatgtaagccaggaacatattcagatcatcgatgtgataaatacagcgataccatttgtgggcattgtccgagtgacgcattcacgtcaatatataatcgttctccttggtgtcatagttgtagaggtcacatcttgtacacctaccacaaatagaatctgtcattgtgtctcgaatagttattgtctccttgaagcttctgatggtaactgtgttacatgtgctcctaaaacaaaatgtggtcgtggatatggaaagaaaggggaagatgaaatgggtaacaccatttgtaagaaatgtcggaagtgtacgtattcagatattgtatctcactctgatccatgtaaaccaaggacgagataatatatactcactggatagacaaaataagttggattatccatctctccctcatcccctccctcactttttatcatcctatatgttattccttccttttctcgcatcatttttcgtgaaatataatataggaataattaacaccagaatagctatggcctgcggtaaagattgtgcatgtattctgtgtcgtctactggatgaagatataacgtacaaaaaataaaaccagagattgaaacgtatcgcaacttatcaaaacatatagatagacgaggaaacaatgcgctacattgttacgtctccaataaatgcgatacagacattaagattgttcgactgttgctctcttgcggaatttatcatggagtgaatgtcctgtttcatttgtttccatgacatattacaaaatcgattccgtccaagatgataaaaacatttaccggcatcataaacacggagtttattttatatggctcgcataaaattactaaaaatatattgatctgtttttctttttctttcgtacatttctaattatgaaaaagtaaatcattatgagatgggcgagatggacgagattgtacgcatcgttcgcgacagtatgtggtacatacctaacgtatttatagacgacggtgagaatgaaggtcacatttctgtcaacaatgtctgtcatatgtatttcacattctttgatgttgatacatcgtctcatctgtttaagttagttattaaacactgcgatctgaataaacgactaaaatgtggtaactctccattacattgctatacgatgaatacacgatttaagccatctgtattaaagatattgttacaccacggcatgtgtaactttgatagcaaggatgaaaaaggacatattcctctacaccactatctgattcattcactatcaatcgataacaagatctttgatatactaacggaccacattgatgactttagtaaatcatccgatctattgctgtgttatcttagatataaattcaatgggagcttaaactactacgttctgtacaaattattgactaaaggatctgaccctaattgcgtcgacgaggatggactcacttctcttcattactactgtaaacacatatccgcgttccacgaaagcaattattacaagtcaaagagttacactaagatgcgagctgagaagcgattcatctacgcgataatagatcatggagcaaacattaacgcggttacgaaaatcggaaatacgccgttacacacttaccttcaacagtataccaaacatagccctcgtgtggtgtatactcttttatctcgaggagccgatacgaggatacgtaataatcttgattgtacacccatcatggaatacataaagaacgattgtgcaacaggtcatattctcataatgttactcaattggcacgaacaaaaatacgggaaattacaaaaggaagaaggacatcatctactttatctattcataaaacataatcaaggatacggaagtcacgctctcaatatattacggtatctactagataggttcgacattcagaaagacgaatactataataccatgactcctcttcataccgccttccagaattgtaacaacaatgttgcctcatacctcgtatacatcggatacgacatcaaccttccgactaaagacggtaagacagtattcgacttggtgtttgaaaacagaaacatcttatacaatgcggatattcacgacatcatccaccacagactgaaagtatctctacctatgatcaaatcgttgttctacaggatgtccgagttctctccttacgacgattactacgtaaagaagataatagcctactgcctattaagggacgaatcattcgcggaactacatagtaaatcctgtttaaacaaggactataaaagtgtatttatgaaaaatatatcattcgataagatagattccatcatcgaaaaatgtagtcgtgacataggtcgcctcaaagagattcgaatctccgacaccgacctgtatacggtattaagaacagaagacatacggtatcacagctatcttgaagtcatacattcggacaaacatatctcatttcccatgtacgacgatctcatagaacagtgccatctatcgatggagcgtaaaagtaaactcgtagacaaagcactcaataaattagagtctatcatcgatggtcaatctagactatcgtatttgcctccggaaattatgcgcaatatcataaccaagctaagcgactatcatctaaacagtatgttgtacggaaagaaccattacaaatattattcataatagaaagaaaatatttaaaaatatctatatgatttgagaagtaggaaacaggaacaagacgataattactacattattaaatcatgaagtccgtattatactcgtatatattgttctctcatgtataataaacggaaaagatatagcaccgcatgctccatccaatggaaagtgtaaagacaacgaatacagacgccgtcccacccactttttatagtaagttttttacccataaataataaatacaataattaatttctcgtaaaagtagaaaatatattctaatttattgtatggtaaggaaatagaatcatctagaacagcaatcatgaaacaatatatcgtcctggcatgcatatgcctggcggcagctgctatccctaccagtcttcagcaatcattcgcatcctcgtgtacggaagaagaaaacaaccatcatatgggaatcgatgttattatcaaagtcaccaagcaagaccaaacaccgactaatgataagatttgtcaatcagtaaccgaagttacagagtctgaagacgatggggtatccgaagaagtcgtaaaaggagatcccaccacttattacactgtcgtcggtggaggtctgagaatgaactttggattcaccaaatgtcctcagattaaatccatctcagaatccgctgatggaaacacagtgaatgctcggttgtctagcgtctctccaatgtacggcattgaatctccagccatcactcatgaagaagctcttgctatgatcaacgactgtgcggtgtctatcaatatcaaatgtagtgaagaagagaaagacagcaacatcaagacccatccagtactcgggtctaacatctctcataagaaagtgaggtacgaagatatcatcggttcaacgatcgtcgatataaaatgtgtcaaggatctagagtttagcgttcgtatcggagacatgtgcaaggaagcatctgaacttgaagtcaaggatggattcaagtatatcgacggatcggtatctgaaggtgcaaccgatgatacttcactcatcgattcaacaaaactcaaagcgtgtgtctgaatcgataactctattcatctgaaattggatgagtggggttaatcgaacgattcaggcacaccacgaattaaaaaagtgtaccggacactactccggtttgcaaaacaaaaatgttcttaactacattcacaaaaagttacctctcgttacttcttctttttctgtctcaagtgtgatacgattatgagcacttttcctatttcctttcagggtatcacaaaaatatttttattctctttctctcttcgatggtctcataaaaaagttttacaaaaatatttttattctctttctgatggagtcgtaaaaaagttttatctctttctctcttcgatggtctcataaaaaagttttacaaaaatatttttattctctttctgatggagtcgtaaaaaagttttatttctttctctcttcgatggtctcataaaaaagttttacaaaaatatttttattctctttctgatggagtcgtaaaaaagttttatctctttctctcttcgatggtctcataaaaaagttttacaaaaatatttttattctctttctgatggagtcgtaaaaaagttttatctctttctctcttcgatggtctcataaaaaagttttacaaaaatatttttattctctttctgatggagtcgtaaaaaagttttatctctttctctcttcgatggtctcataaaaaagttttacaaaaatatttttattctctttctgatggagtcgtaaaaaagttttatctctttctctcttcgatggtctcataaaaaagttttacaaaaatatttttattctctttctgatggagtcgtaaaaaagttttatctctttctctcttcgatggtctcataaaaaagttttacaaaaatatttttattctctttctgatggagtcgtaaaaaagttttatctctttctctcttcgatggtctcataaaaaagttttacaaaaatatttttattctctttctgatggagtcgtaaaaaagttttatctctttctctcttcgatggtctcataaaaaagttttacaaaaatatttttattctctttctgatggagtcgtaaaaaagttttatctctttctctcttcgatggtctcataaaaatattaaaacctcattctgatgcatcaactatttcttaaacaataacgtccaacaacatatactcatagagcttatcaaacatcccctgtgcccatctaggttgccagacaattgcatcataaaataatgtttataatttacacgttaacatcatataataaacgtatatagtataatattttttggcatataaatgatctagtaaaatccatgtaggggatacggctcacgtttttttctttggtacaaaatttcacacagtttttatacagacaaatattctctcatccatatattttaaaacattgacttttgtactaagaaaatattaaacctctttctgacggagtcgtaaaaaagttttatcctttctccttcgatggtctcacaaaaatattaaacctctttctgatagtctctataaagcgattgatttttcttaccctcagagtttcctacagtcgtg

SEQ ID NO: 2 - DNA, 209544 bp, Artificial Sequence
  Synthetic Construct, Sequence of ECTV-?036
cacgactgtaggaaactctgagggtaagaaaaatcaatcgctttatagagactatcagaaagaggtttaatatttttgtgagaccatcgaaggagaaaggataaaacttttttacgactccgtcagaaagaggtttaatattttcttagtacaaaagtcaatgttttaaaatatatggatgagagaatatttgtctgtataaaaactgtgtgaaattttgtaccaaagaaaaaaacgtgagccgtatcccctacatggattttactagatcatttatatgccaaaaaatattatactatatacgtttattatatgatgttaacgtgtaaattataaacattattttatgatgcaattgtctggcaacctagatgggcacaggggatgtttgataagctctatgagtatatgttgttggacgttattgtttaagaaatagttgatgcatcagaatgaggttttaatatttttatgagaccatcgaagagagaaagagataaaacttttttacgactccatcagaaagagaataaaaatatttttgtaaaacttttttatgagaccatcgaagagagaaagagataaaacttttttacgactccatcagaaagagaataaaaatatttttgtaaaacttttttatgagaccatcgaagagagaaagagataaaacttttttacgactccatcagaaagagaataaaaatatttttgtaaaacttttttatgagaccatcgaagagagaaagagataaaacttttttacgactccatcagaaagagaataaaaatatttttgtaaaacttttttatgagaccatcgaagagagaaagagataaaacttttttacgactccatcagaaagagaataaaaatatttttgtaaaacttttttatgagaccatcgaagagagaaagagataaaacttttttacgactccatcagaaagagaataaaaatatttttgtaaaacttttttatgagaccatcgaagagagaaagagataaaacttttttacgactccatcagaaagagaataaaaatatttttgtaaaacttttttatgagaccatcgaagagagaaagagataaaacttttttacgactccatcagaaagagaataaaaatatttttgtaaaacttttttatgagaccatcgaagagagaaagaaataaaacttttttacgactccatcagaaagagaataaaaatatttttgtaaaacttttttatgagaccatcgaagagagaaagagataaaacttttttacgactccatcagaaagagaataaaaatatttttgtaaaacttttttatgagaccatcgaagagagaaagagaataaaaatatttttgtgataccctgaaaggaaataggaaaagtgctcataatcgtatcacacttgagacagaaaaagaagaagtaacgagaggtaactttttgtgaatgtagttaagaacatttttgttttgcaaaccggagtagtgtccggtacacttttttaattcgtggtgtgcctgaatcgttcgattaaccccactcatccaatttcagatgaatagagttatcgattcagacacacgctttgagttttgttgaatcgatgagtgaagtatcatcggttgcaccttcagataccgatccgtcgatatacttgaatccatccttgacttcaagttcagatgcttccttgcacatgtctccgatacgaacgctaaactctagatccttgacacattttatatcgacgatcgttgaaccgatgatatcttcgtacctcactttcttatgagagatgttagacccgagtactggatgggtcttgatgttgctgtctttctcttcttcactacatttgatattgatagacaccgcacagtcgttgatcatagcaagagcttcttcatgagtgatggctggagattcaatgccgtacattggagagacgctagacaaccgagcattcactgtgtttccatcagcggattctgagatggatttaatctgaggacatttggtgaatccaaagttcattctcagacctccaccgacgacagtgtaataagtggtgggatctccttttacgacttcttcggataccccatcgtcttcagactctgtaacttcggttactgattgacaaatcttatcattagtcggtgtttggtcttgcttggtgactttgataataacatcgattcccatatgatggttgttttcttcttccgtacacgaggatgcgaatgattgctgaagactggtagggatagcagctgccgccaggcatatgcatgccaggacgatatattgtttcatgattgctgttctagatgattctatttccttaccatacaataaattagaatatattttctacttttacgagaaattaattattgtatttattatttatgggtaaaaaacttactataaaaagtgggtgggacggcgtctgtattcgttgtctttacactttccattggatggagcatgcggtgctatatcttttccgtttattatacatgagagaacaatatatacgagtataatacggacttcatgatttaataatgtagtaattatcgtcttgttcctgtttcctacttctcaaatcatatagatatttttaaatattttctttctattatgaataatatttgtaatggttctttccgtacaacatactgtttagatgatagtcgcttagcttggttatgatattgcgcataatttccggaggcaaatacgatagtctagattgaccatcgatgatagactctaatttattgagtgctttgtctacgagtttacttttacgctccatcgatagatggcactgttctatgagatcgtcgtacatgggaaatgagatatgtttgtccgaatgtatgacttcaagatagctgtgataccgtatgtcttctgttcttaataccgtatacaggtcggtgtcggagattcgaatctctttgaggcgacctatgtcacgactacatttttcgatgatggaatctatcttatcgaatgatatatttttcataaatacacttttatagtccttgtttaaacaggatttactatgtagttccgcgaatgattcgtcccttaataggcagtaggctattatcttctttacgtagtaatcgtcgtaaggagagaactcggacatcctgtagaacaacgatttgatcataggtagagatactttcagtctgtggtggatgatgtcgtgaatatccgcattgtataagatgtttctgttttcaaacaccaagtcgaatactgtcttaccgtctttagtcggaaggttgatgtcgtatccgatgtatacgaggtatgaggcaacattgttgttacaattctggaaggcggtatgaagaggagtcatggtattatagtattcgtctttctgaatgtcgaacctatctagtagataccgtaatatattgagagcgtgacttccgtatccttgattatgttttatgaatagataaagtagatgatgtccttcttccttttgtaatttcccgtatttttgttcgtgccaattgagtaacattatgagaatatgacctgttgcacaatcgttctttatgtattccatgatgggtgtacaatcaagattattacgtatcctcgtatcggctcctcgagataaaagagtatacaccacacgagggctatgtttggtatactgttgaaggtaagtgtgtaacggcgtatttccgattttcgtaaccgcgttaatgtttgctccatgatctattatcgcgtagatgaatcgcttctcagctcgcatcttagtgtaactctttgacttgtaataattgctttcgtggaacgcggatatgtgtttacagtagtaatgaagagaagtgagtccatcctcgtcgacgcaattagggtcagatcctttagtcaataatttgtacagaacgtagtagtttaagctcccattgaatttatatctaagataacacagcaatagatcggatgatttactaaagtcatcaatgtggtccgttagtatatcaaagatcttgttatcgattgatagtgaatgaatcagatagtggtgtagaggaatatgtcctttttcatccttgctatcaaagttacacatgccgtggtgtaacaatatctttaatacagatggcttaaatcgtgtattcatcgtatagcaatgtaatggagagttaccacattttagtcgtttattcagatcgcagtgtttaataactaacttaaacagatgagacgatgtatcaacatcaaagaatgtgaaatacatatgacagacattgttgacagaaatgtgaccttcattctcaccgtcgtctataaatacgttaggtatgtaccacatactgtcgcgaacgatgcgtacaatctcgtccatctcgcccatctcataatgatttactttttcataattagaaatgtacgaaagaaaaagaaaaacagatcaatatatttttagtaattttatgcgagccatataaaataaactccgtgtttatgatgccggtaaatgtttttatcatcttggacggaatcgattttgtaatatgtcatggaaacaaatgaaacaggacattcactccatgataaattccgcaagagagcaacagtcgaacaatcttaatgtctgtatcgcatttattggagacgtaacaatgtagcgcattgtttcctcgtctatctatatgttttgataagttgcgatacgtttcaatctctggttttattttttgtacgttatatcttcatccagtagacgacacagaatacatgcacaatctttaccgcaggccatagctattctggtgttaattattcctatattatatttcacgaaaaatgatgcgagaaaaggaaggaataacatataggatgataaaaagtgagggaggggatgagggagagatggataatccaacttattttgtctatccagtgagtatatattatctcgtccttggtttacatggatcagagtgagatacaatatctgaatacgtacacttccgacatttcttacaaatggtgttacccatttcatcttcccctttctttccatatccacgaccacattttgttttaggagcacatgtaacacagttaccatcagaagcttcaaggagacaataactattcgagacacaatgacagattctatttgtggtaggtgtacaagatgtgacctctacaactatgacaccaaggagaacgattatatattgacgtgaatgcgtcactcggacaatgcccacaaatggtatcgctgtatttatcacatcgatgatctgaatatgttcctggcttacatagtttacaacactttaattcttgttcacatttcatagacaatgaatttgtattaataatcaagaatcctaagatgatgataactttcgtcatcgttaagtcaataatgattaatttatttattatatgttaatgtcataaaaactaattgtttgttagacgatttaatctcaatctctttcacaatcatttggtggaatatgatcaacatttagtatataactagtatgatacgcgacgacgtccatgtcggaatatatcgcgtccgtattggcatatactatatagacatcgagattagagagacagtctcctaccacagttaccgtttctgaatgaggcataaagtataccttcgtcgtgggtgttagttgtctagattctcttccagaattacatttgatttctagattaatcttgcactgcgttgtgaggtcttgatgtactttatcgtttgtaaagaaacctgaagttgctagtttatcaacgactgaatagtaatctccaataaagacaggagtacaatcctcatgtgttagagtaattgttaactcggaagttgatatggtactgctgcttcctatactcgaattacaagaggtcttgttaacaggatacatattaatttctacatctatgctgttaaaggacagatcacatttatctatattacccggacactttttacatattacatctcctttagatgagtagccatatacaccgtaaccagaaccacactttgtttgtggtacacatagcctgcaaccgtttgatccttcaaattcgcagtagtatccggatgcacagacacatactctgtcctgtgtgttactacacgatttagtctctacttgattactgctacatttgcctcgacaacttagacacgcgggactatgattaggaatggatgtaaaggtgtcatctgggcacttgtcacattttgtattagaagtggtattacaggaatgagtcatatacattccaggattgcattgtttacaacatagattattactgttatagtctgtaccgttacatttcccattaatgggtgtatacggaacatctccacttacgactacgaacatatataccaacaagatatatgatggtgtcatcttcatcattaatatctagttaaatttataataatgttttagatggttacgaccatacaaaatagtatttaaatcgtattcgcttaacttggatattatctcgcgtatgatttctggaggcaatagtgagagtttgttattatcaacagacgatgatatactatatattttgtcaatgacagtatttatgagtttatatttacgttttatgtgtacgttacaattctctataatgtccatgtacatgggaaaagtcttgtttgtaacatggatatcattaactagattgtatattttatattttatatcttcatatcttaatatattataatagttttcttgtttgagcctatttatatcattgacgcaatctgaacgatattatctatataatcgaatgttattaaatcaataaatagttcttcgtacgtatgatttaaacattgattattgtattcttttatgaaattgttgttcattaagatgcaataagttattatatatcttacatagtaatcatttggaaaatacggaataatactaattattttttgattacggataacgttatatctagtccgtgttttataagatgatagataatacaatctatatatagcttattatctgtttgtgctaatataatatcaaatatactcttgttatcgttagttgggagattaatattacatccaatatatacgagataagacattatatcaacgttgcacgctataagcattatgtagaggtataacgtcattaaagtattcatcgtttttatgtcaaacttctttagtaaataggatagtatattaaggtcattactatcattatccttatgaatagatagatataaggagatgccgaccttctttcttttctagttttctgtatttgactcgtaccaattaattaacattaaaagagtattgtattctatatcttcacattttatatattccattatgggagttagacgaacattgtttttgtattgtcaagtcagctcccaatgataaaagagtaaatattatacgaggactgtgatcatattgtgatatgtagaagtgtagaggtgtatttcctctattatttactttattaatatcagctccatattttaccaactctttaataaatttcttttcacgatgcatcttattgaatggcatcttattataagtggacatatagacgcagaagtaatgaagaaaagtattacctctatcatctgcataattagtgtctgctccttttctcaacaacttatatagcacgtagtagtttatcagaaagcatatcaaagatatcattctcaactttatcatgagttagatatttgtgtaacggaatgtgtccatcactaatcacgaacattaaacgtattcatgccatactcctttactaggttttttaaaacagatgattcaaatctttcattcattagataacagtgtaatagagttgtcccagattctagtagtttgtttatatcacagcattctataaacagtgtctaaataatagagaagatggacagacttcgaagtattcaaagtataaataacacatgttatctatattcgttgatgaattattattaaacatagttatgataaatgattctgatgacatctcgctagttataaaatctatcgtatcattaaacatcgttgcatcataatcgcgtagcatagtttttcataattaatacaatatttagaagacttattcggaaagtattctaataacatttatcattgattatataatgaatagagatccacatgagcatggatgatatggtaatgtaactatcgatactcatttttaataatacttgtgaatatatcattctgtgatgcaagcatgtaaacgtaaatatcattttaaaaaaatcatcaatattctcaactagtaatgaactgaacttccagtaccaaactggttctaaaagcgttaaactattttattagtaccgattatccataatttccatagatactgtttcaagactattatgatgctcagatttaatgctcctattgtcgtaatccttcatcattttatatttcctggttctatatttattgcgcgctatataaattgccaatatcaaaataatgactaacagtagcagaatagcgccacatatgatatataatatattgtagatatctgacgaactgtttagataattatcttcttcttttattataataacacttacgtttttatcgaattccttaaacatgtcattcaatgcttctgctacagcacttgctactatctcatcttctatagcatctttggcatcttttgtatccaaggagattatagtcatttcataacatgataaaacaactacacctgatgattcaagatagtcatagctcatataagtgtcgtttactaacacataagatttgttagtctctacagaggtgtatatataatcatctaaagtaccacatagataattatcaataggatagtacttttcaacacgattgttcttaacatctattatacaacatctcttaccttcttcggattctataatgtcttttatatctttgtctgatagagtgtgtataaataaatctctggtgatatcatttattttgttctgtatctcagccatcttttccttatctgcttgatatgcaatatctaacagattaccatctatattaacacttgctatttctctaccctctgaagtcaatgcctttgctaatctgtttatagacgccggcaatgatccgtcgctatattccataatcttcttgtattcattgtacagatcatttaatttgttactaatttctttatccacatattcgttagaattgtcatgagtgaattcgaatgtgtaaggaggttgctgtaacacgttagattctatccatatgtctctatattctatatgaatatatgacttacatggaaaatgacctatatgttgatacttgataattagtataattactatgtattatattcattattatgaggaggatttatgtcatatcatgaaattaataagagaactagattaaagtaataggaattggaattggaattactctttatttgtcgcactattataaaaagatgttatatctcaatcactgctataaagatccatcatatctatgataccgtatcagttcctatcaatctctgttttgggtgaattcaaaaaaattaataatacctagaaaatattccacgagcattccttttatcgatatagcatttggatagcctgtcaatatcgacatcattgaacaacggattcatcttacacttttcacgaacatcctgagatacattgttccatcttataacccgaattagatccttgtcttcggggaactcagttaaccaatcaagaataatatcgatgaccgcatcttcgttgacatctagatagtcgcagttcatgatattaaacatggaatcagttgaaattaattctttgaatctagtatccttccacaatgtttcaatatcattagcaattttttcctcgatcacagtcatgacatcgtatatatcttccatttccttaaatctattgctaaacaactcatacatctcaagagagtttctttcatctattatataatgaaagatacgaactgttgcatgtcccaagatctcagaatcaaggaagcgagcaagatcaaacatttcaactacatcttccaactcaagatcacccatgactcctgtgtatatgaaatcaatggccgtctcgataacaaaacctgaataatcaatattgaatattttttgatctggatcattacttagcatctcagcaaagtatgtagaaaatccagatacaaccaccttatgtgcgctaatgtcgttgttatcttttgtgtggaatgttatatcacaaaactttccagattttctaagatcattcatattgttagctagatcatatctatgtttcacacacaattctttctcatgttcgttaaggtcgtacccgcgaacaaaatagtaatcactcattctgacgacagcataaatagaaatagtttttctattttttatagagagtatctccctattacctcattatatgataatgtgttagatatttgaacttaacaatatcgtttataaaaaatcattcatgtgtctgtgtttggacgcttgtcatagactgtagtgagtagtcaatatcacatcctatgtaatcaatagcagtgttagtcgcataatatttcgtatacaagtcacgtatttctggtaggttcatgttggaaaatatctccataactaattcttttgggatggtattcaagtaagttggttgatcatggtctatgtagtagatgactttcctcataagattgcatttctctctaataccactaataacatctttcacgatatcgtgatatatgtttgattcggtaattaattctttatcatagttgccatacactggaatttttatattattatttaacaatatgttgtatatagttattccatacgttatatagatagattttaacgacatggcatcactattatagcgatacgcgttgtgtaaaacatttatatatttttctctgcttacatcatcgagaggatagttatcttcagcattataatatatattgttaatataactacattcgtagtcttcttcatcatcttcttcggtttcacgtactaaaatatcatccctctgttgtatcttaaattctatagcctccttgaacttggaatagaacgacggaaccattaatattagataactaatgacagttggactacattcccatacatctcttactttattcatgagaacacaatcaataatatggtccgtcaatggacctaagatttctttaggaggtaattgactaatgagaaaactagtccacttacgagcactatatacacgtaatgccaaatagaaaatagttttattattataagttcgtaacgtcatatcagctccattatcgagtaagtattttgcaatacgtatggtgttgtactttatggcataatgtaacggcgtataaccgtcataatatttattaatatcaaacccgtctagagatctaataatatctagacactctgtatctatatatgactttttaatgtagtcgtgtatgacagaatctctgaataattccggtttagcatgtttactaagtattaaaagtttacgtagtatctttatattttgtatattatcgatattattaatattatggatagccgtaatgacaggaattctgttacatgcattaggcataattatatctgctcctagttctataaatgtatctatgattgtttcattgtaaaaattgcttcttgtaaaaccatgtaagtaataatgtaacggtgttcccaacggagtattttcattcatggcgtttatatcgtttccattatacaccaataacttcatgtaattaggtgttattaaactttttaaaccagccaatacatgaagaggagtaccgtaaaagatacgcgttaatccattaaagtctccacaataataagttttaagacaatgtttgttagtcagaactaacttcttaaagaatggatagtcaaattttttatgatttaatagataaacatgaactaaagacgatctctggttcatagtaagataatcgtttagtatatcaatcatttctaaattcattatgtcccgtttaaaatatgcagatacggctgtattcagataataatccttgactgttaagtcatatccgttagcgaggaaatcttttacaatgttcatatctaaatcattttttctgatttcgtcagaatatcccaagatagaactattttttttatatctatcatcgacgacattagtttcttcccatgtttgagtagatgcgtctttagtagacagttctttatattctacatttggttcattacatattgtattgtagaaagataggtaatcgtcatattcgtttttatttgtagcgtttattgtgttgttttctggattctcaaagtattgagattcatgagacttcttgctagcaatataaaagtatttatgtaatgaatatctttccatctctacaaagtataatatatttgataaaaattcaataatctaccattggaacttcacatatccatcttctatctgcgtatattctagcagcactaattccgttgtcgttgagataagcatagtcttcaacacatctaatatgtataatattattatatggtttattatcacaattcaaccatggcgattgtgaattagtcctatatagcccaataatcaaatatacccttgtatctgtatatcttaggaaatgtgtcattaataatacatgctaaacgcccgttcatatttttacaatatttaaacgatgctgtccaattggtgatatattctgaaaagtaataacatatgttgtttataccaatggtgtttttaggacatatcttgtatcttgtttcttctttaaagcatctatgttcgatgaaacatataactaaaaatgaggatagtagagatagagataatataactatcacgacgcggtaaactaattcgcgcatgataaacaacattgttacattatatcatcattaattaatttatttttatttttatttttatttttattggtaatgccaggatgcttaataaaaatgtttaacgaacataatctgctttttaatcaagtcgtgattgttgtaataatctagatttatatctgtattaacgtcaaacaaacttaaatctattttaaagaagctgtacgtatacagtaacgtcttatcagacgtaagtacttgatctcccagatttatattcacgtactcctccattgtgtaaaattaatcatataagtaaataatcataaaatattatatcaattttattatatgaatgatagctatctaattaatagttctagtggcgcaagtatttggaggtataccgctaatatcgatcatgtttcctatatgaatagtagcagtatcctcttcaaatccctcatcggtattgacgtacacaatatagagatggagatctgatagacagttgcctattaaagtgaaattttcagcgtgggttgatgctgtttcaggaacacgtgtaaaattaccgattaatacaggttccgtttcagcgttacattttacttctacattcagcgtacacatcttggatgtattttgtttttttgtagtatctgtgaaaagtccggctacagcagttttatcctttatagaataatattctgttacaaagactggatcgcagtctgtactattaacagtaattgttaattcagaagtcgtgataatatcggatgattgttttgtacttagtcgattacaagatgatacgttaactggatatagttcaaaatctatagatatgtaattaaatgtatctgtaatgtatttgttttcgaagaaaccgggtggaggataatcatttgcaaacgatgcgacaaataatgatgcgaatattagtattgtgtttatgtttatgtttatcatgatgagtatttatgataacaaagttttgtattatccggagtggtacagcactgttcggttggttctattttctttgttgtggtatcaggagtacatcttgcacaactattgacggcaggcagcatacatttcaatcctggaccacattgacattttcgtggtttatccggaccacatgattgtatctctaccatattgcttaaacaagtaacacacgccttacataaaccatcttcaggttcaagatagtaatcattaggacacgttttaccaaatgatgtatatactaggcaggttacgatagcggataaaaagatagtattcatcttcatgctatttaatacatctaatatatgtattggtcattaaaaaatattattttatagaaactttgtgtatgtatccagaacaattttatcttgttacgcttcatctgtaagtcgagcattgataaatgcggcatgatgtctgttaaatattatttttttaaaataacttagtctaaatatcccgataatgcaactaaataaaagagtaacgggaatacacataacgggatacatatccatgatgtatcttgatatgtcattggctatataatacatagatcgcgcatctgttatgtacgtattaactatatcatataatggatcattgccatgacaacacgctactagattgtgattttccctatgtgtgattatgtcctctttgtaacatttactaactagtatatcgtatatactgatattagttctcgaattaatgtgtaacttggtcaatttatcgatgttatctctgatgctaactaacttatcaagcgccaaaaacattgcatgactattatcgagaatcgctatatccctctccatatactcgatgcatttattacagtaatccaatccagctaacataagagccaatctcaatgttggtttaatgatatcatcttcacttaataataacgatggaaactttccagtagcgtaacacttatctaagaagtatataactatgtctacattaggtctcttatcgagaatattcttaacaatataccattggtgacctgacaacgtattatttcccatggttaacattagagggtatacaccattttttgtcggtatattaatattggtttggatggataataagtacacacatgaatccatgacaatattggcattagtatgcgagataatagatacatgtaatggtgtcataccagacgtttcgcatactgcgttattatatctttctataatcgcacaatgatatacgtcatgtatatttgtactatcgtacggctcatattcatcagtatataagtcagtaggtatattatatttagcaataatatggtgaagaatgcatggagtatcgtctactctaattaatagatcttgaagtatacgattctttaccatattcaatactttatcagatatcaggcaatctattatgtcataatacatataattttgagcggtgcatatatatgaagttaatggagtataccctaaacaattgactgctgttatatccgcacccaaggatatcagacactgaataacatctagtcttatatcgttatcggtttctggatctaagatattaacaacagacaacatagagagatatgtgtgtagtaccgtattaccaatattgtcgggttcatttatatcattcccgtactcgtgtaaaagtttaatgatgctagtacttatgttgtgtcgcagaatatattgatgaagacaagtccttccagcactatctttataatgtagttttactcctggttgtaaaaaggagtacatgacagatatatcgatattccgagctagtgttatatacgaatgtagcatcataggtatattttttactttattgccatctagtgattctacgtacaagtttgttatttctggattaatattatctatattggctatgtatgtcataatcggactcattccattaacgcatttcatatccatgtctccaccgagttcgataatctttttaattacgtacgcacaaacatttcctgttatcgtgtacgtgtgcaacggagtaataagatcacgattctgcaaatttacatttactccgttattgcataaccactctaatatatctatatcaacatccatgttgccgagatacgcgtgtaggataccgtatcctgttttcttacatacataattaagatttacaattcctacatctaccatatatttaatcaagtctagttctatacttcggattttcggtgagttgaaatatgtatataaaatatccatatctccattgttgggaatatcaaacacatgattggcggttttacttttattatctttaatacatttgatgaaatttttatactgatcaaccaacgatttgttttttctgtctgtttttaatatcaaaatcatattactgataatattaatcaatgcggttttactatcggtatactgttcacgatatctattatcgataccataatatttctttttaaaaacttttatgcgtttggttataactgtgtgattataactgtatatatccccatcgctacagtatccatcatctggatcatcattatttatacgagcattggtgcttgtacggttatcaaaatcttcaaagtacatcgaatatatcagttttctgacattaactatagcgtgttcggtcaatgatgccattttgataactataatcaaaatctgtcagtgttggtagtacataaaaagtttatattattgttacatttttaaaaaagatcaatgcataaaaaaattagaagtgttagattatattaattatactataaaaattagaagtgttagactttaactatcttataacttataacttataacttataacttataacttataacttataacttataaaactattgactattaactatcttataactaacttataactaacttataactaatttataactattgactattaactatctttaacttataacgattgactattaactatcttataacttataactatcttataactatcttataactcttataactcttataacttataactattaactaacttataacatattaactcatttcaagaagggtggtgagagaactctatgataacttgtgaaacaattagatccctaatttctaatggtagttttgataggagattgtcatcagttgatacattgtttattatctcatctattagagcacgtctgtttagagctttagtgccatgctcgtttacttctgtgtaaatcttaaatcctttagtgatacactgtttcaaaactggatgtttagaatacctatgaagaatgtgggaagcatgcttcaacacattcaatattgtattgtattgttattgttattgttattgttattgttattgttattgttattgttatattatttacacaatagacaatgtattgtttatatactgaattaataatacaaaaattccaatcttgttattaaacgcacgccgagaaaaatagtataaacataaaataaaatccatcaaaatgtcgtttaaatatctgatgttgttcgctgctatgataatcggatcattcgccgataacgttaccgtcgaaacggcatcgccagaaattgcaaacactacaacagatattccagatgttatcgtattatgcggtccagagggagatggctattgtttacacggtgtctgtatccacgctagagatatcgatggtatgtattgtagatgcgatcatggttacacaggcattagatgtcagcatatagtatagtagactatcaacgttcagaaaaaccagacactacaacatcatatatcccatctcccggtattgtgcttgtattaataggcattattatgtgttgtctattatctgtttataggttcactcgaagaactaaactacctctacaagatatggttgttccataatttttataaaattttttatgagtatttttacaaaaatgcataaagtgtatgtcgtatgtatatttataaaaatgctatgctatgcaatgtatctgtattatttgtatttatctaaacaacactctacctctagatatgatacaaaaatttttttatttcagcatattaaagtaaaatctagtcaccttgaaattgaatacagtgggtggttccgtatcaccagtaagaacataatagtcgaatacagtatcagattgagattttgcatacaatactagtctagaaagaaatttgtaatcatcttctgtaacgggagtccatatgtctgtatcatcgtctagtttatcagtgtcccatgctatattcctgttatcatcattagttaatgaaaataactctcgtgcttcagaaaagtcaaatattgtatccatgcatacatcgccaaaactatcacttatacgtttatctttaacgatacctatacctagatggttatttactaacagacattttccagatctattgactataactcctatagtttccacatcaaccaagtaatgatcatctattgttatataacaataacataactcttttccatttttatcagtatgtatatctatatcaacgtcgtcgttgtagtgaatagtagtcattgatctattatatgaaacggatatatctagaacggcaattgtcttacgtccagttaacactttctttgatttaaagtctagagtctttgcaaacataatatccttatccgacgttatatttcctgtagggtggtataattttattttgcctccacatatcggagtttccaaatatattactagacaatattccatatagttattagttaagggtgcccaattagaccacgtacgcttattatcatcatttggatcgtatttcataaaagttattgtgttatcgatgtcaacacattctacattttttaatcgtctatatagtatttttctgatattttctataatatcagaattgtcttccataggaagttgtatactatcgaaatcagttacatgtttaaataattctctgatgtcattccttatacaatcaaattcattattaaacagtttaatagtctgtagacctttatcgtcgtaaatatccattgtcttattagttacgcttatttttatgtgtttttacgttgctttattatatttttataagaatgattgtttgactaataacgagaactattaagacacattattaggtatatatttataaaaaagtttttgattacgatgtcatacgcggaaagaggacacattaacatcatacatcaattaattacattcttataacatcgtaatcaaaagaattgcaattttgatgtataccaactgtcaatggattatggaattgtatattacacattataaggtatgatgtaacgacaattaccgatcggtatttgtctgccagtgtaatagaattatatattctattacaccggccttgtatacataataataagttgtggtagtatgatctccatatttataatttaggactttgtattcagtatttttggaatcataaaaaaataaaaaaagttttactaatttaaaatttaaaaagtatttacatttttttcactgtttagtcgcggatatggaattcgatcctgccaaaatcaatacatcatctatagatcatgtaacaatattacaatacatagatgaaccaaatgatataagactaccagtatgcattatccgaaatattaataacattacatatttcatcaatatcacaaaaataaatccagatctggctaatcaatttcgggcttggaaaaaacgtatcgccggaagggactatatgactaacttatctagagatacaggaatacaacaatcaaaacttactgaaactatacgtaactgtcaaaaaaatagaaacatatatggtctatatatacactacaatttagttattaatgtggttattgattggataaccgatgtgattgttcaatcaatattaagagggttggtaaattggtacatagctaataatacctataatccaaatacacccaatagtacaaccatttctgagttggatatcatcaaaatactggataaatacgaggacgtgtatagagtaagtaaagaaaaagaatgtggaatttgctatgaagttgtttactcaaaacgattagaaaacgatagatactttggtttattggattcgtgtaatcatatattttgcataacatgtatcaatatatggcatagaacacgaagagaaaccggtgcgtctgataattgtcctatatgccgtacccgttttagaaacataacaatgagcaagttctataagctagttaactaataaataaaaagtttaattatcgacgatgtatgtcgttatttttctcatatgaaagattaatttgattctaatataatcttcagtattggatgaatctcaattcaaattaattccattagattatatcataaataaaaatagtatcatgtgctacttcagccaaatattctttttttgaaacgccatctagcgtagtgaggacacaagtgaacctataatgagcaaatttattagtatcggttacatgaaggactttacgtagagtggttgttccaccatctgtggtacgaacggtttcatcttcgttgatgccatcgcccagatgttctataaacttggtatcctcgtccgatttcatatcctttgccaaccaatacatatagctaaactcaggcatatgttccacacatcctgaacaatgaaattctccagaagatgttacaatgtctagatttggacatttggtttcaaccgcgttaacatatgagtgaacacacccatacatgaaagcgatgagaaataggattctcatcttgccaaaatatcactagaaaaaatttatttatcaattttaaaggcataaaaaatacttattgttgctcgaatattttgtatttgatggtatacggaagattagaaatgtaggtattatcatcaactgattctatgatggttttatgaattttattatgcttcactattgcatcggaaataatatcatatgcttccacgtatattttattttgttttgactcataatactcacgtaattctggattattggcatatcgataaataattttagctccatgctcagtaaatattaatgagaacatagtgttgcctcctaccattattttttcatctcattcaattcttgattgcagagatctatataatcattatagcgttgacttatggactctggaatcttagacgatgtacagtcatctataatcatggcataatacattgttttatagcataggcattatctacgatattagatatttcactcaatgaatcaatcacacaatctaatgtaggtttgacataatagcattttcagcagttcaatgtttctagattcgttgatggcaatggctatacatgtatatccgttatttgatctaatgttgacatctgaaccggattctagcagtaaagatactgattgtttattatatctaacagccttgtgaagaagtgtttctcctcgtttgtcaatcatgttaatgtctttaagataaggtaggcaaatgtttatagtactaagaattggtcaatcatacgacctgtcgcgaagaccctttctgtatgcattagtgtagaaattataacatccatagttggatttacataagtgtccaatcgggatctctccatcattgagaggattgacagcatctccccttccttttttagtagatatttcatcgtgtaagaatcaatattaacatttctaaagtatccgtgtatagcctctttatttacaacagctccatattccaacatgcattccaatagagagatatcgatatcgctgaatgttatatactcaattagtatatgttggaggacatccgttcattgttttcaatatcaaagagatggtttccttatcctttctccatagtggtacaatacctacacattattccgtgcggctttccattttccaaaaacaatttgaccaaatctaaatctacatctttattgtatctataatcactatttagataatcggccatgattcctcgagtgcagcatgttagatcgtctatatatatatgcataagcagtgttatctattcctttcattaacagtttaacgatgtctatatctatatgagatgacttaatataatattgaagagctgtacaatagtttttatctctagaagatgggttgattccatgattaatcagacatttaacaacttccgggcacacatgatctcgaatccgactctgaatagagcattattcttgaattggttcctggtatcattaggatccctgtctttcaacatctgtttaagtttatcgagaaccacctcctcattttccagatagtcaaacattttgactgaatagaagtgaatgagctactatgaactctatacacccacacaactaatgtcattaaatatcatttttgaatgtatttataccaggtcaaaaaacttgtacaattattaataaaaataatttagtgtttaaattttaccagttccagattttacacctccgttaactccactttttacaccactggacgatcctcctccccacattccaccaccagatgtataagttttagatcctttattactaccatcatgtccatggataaagacactccacatgccgccactactaccccctttagaagacatattaataagacttgagttaagacaagtttaacaataaattaatcacgagcaccctactaccaacctacactattcatgattatagtttctattttttacagtatattgactaaagtctctagtcacaagagcaatactaccaacctacactattatatgattatagtttctatttttataggaacgcgtgcgagaaaatcaaatgtctaagttctaaattctaacggtagtgttgataaacgattgttatccgcggatacctcatctatcagttgtctattttcttactttgttttattaacttattagtattatatattatttgattataaaacttatattgcttgttagtccaatctgtaaatatcgtttctttgtatgtttatttaacttgtacatcactgtaagcatgtccatgccatttattttaacttgacgcatatccgcaatttctttttcgcagtcggttatatattctatataagatagatacgtatcacatgtgtacttatagtcgactaatatgaagtatttaatacaagtttctagtatacgtttgttacgaatgttcgcggagtatagcctattattttctaaataacaaactgttttctttatatattcgatggttggtaatttactcagaataatttccaatatcttaatatataattctgctatttctgggatatatttatctgccatcataacacaaatactaatacatgtagacccatatgttgttatattaatatctgcgccattatctattaaccattctactagggcaacactatgcgactcgatacaataataaagtatgctacgtccatgtttatctattttgtttatatcatcgatatacggcttacaaagttttagtattgataatacatctaacgcacgaatcgagaaggtagggaataatggcataatatttattatgttatcattatcattacgatatgtcagaagataatgaatatctgtacgcttcttcttgtactgtaacttctggttttgttagatggttgcatcgtgctttaacgtcaatggtacaaattttatcctcgctttgtgtatcatattcgtctctagtataaaattctatattcagattatcatgagatgtgtatacgctaacggtatcaataaacggatcacgccatttagtcataacagtaatccaaaattttttaaagtatattttaacgaaagaagttgtatcatcgttaggatttggaaaatcttgtctacagtgtatggcacgagatcctcataagtgtatatgtctaaagtgatgtttaatttatcaaatggttgataatatggatcgacagaacgacaatttccgaagacggaaataagatatagacatgcaataaatctaatagcggacatggctacctccttaaaaaatacgaactctttggctatttagtaattggcacttaacaatgctccattaatccatggactcataatctctatatggaattagtggatgttctatatacggggatgagtagttctcttctttaactttataatctttattaatcatatttagtctgatgtatgggtaatagtgtttgaagagctcgttctcatcatcagaataaatcaatatctctgtttttttgttatagagatgtatcacggcctcatatattacgtaatagaacgtgtcatctaccttattaactttcacggcatagttatttgagaatactgtcaatcctttgacctcgttgatttccgaccaatctgggcgtataatgaatctgaactttaatttcttgtaatcattcgaaataatttttagtttacatccgtagttatctcctctacgtaactgtaaatttctcaatgcgatatctccattaatgacgatgtcgaattcgtgttgtatacccatactggatggatgaacgaataccaacggcaccaatagtaatttactttttcatctttacatacttggtactagttttactatcataagtttataaattccacaagctactatggaatacgccaaccatcttattatagcacgcatgtcttaaagtttattaattatatgttattttatatatcgctacgaatttaaacagagaaatccgttaggaagaaaaaaattatctatctacatcgtcgtctattagataatgtctctgtattctacgatagagtgctactttaagatgcaacagatccatgtcatcgaatatatactccattaaaatgattattccggcagcgaacttgatattggatatatcacgacctttgttaatatcaacgacaatagacaatagtcccatggttccataaacagtgagtttatctttctttgaagcgatattttgtagagatcttataaaactgtcgaatgacatcgcatttatttctttagctaattcatatatgtcgccatcgcaatatctaacagcatctatcttaaacgtttccattgctttaaagacgtttccgatagatggtctcgtttcatcagtcatactgagccaacaaatgtaatcgtgtataacatctttgatagaatcagactctaaagaaaacgaatcggctttattatacgcattcatgataaacttaaacaatgaaaaatgtttttcgttgtttaagtttattgagtagtatatcttaataattgttattatttcactaatttaatatgtagtaatgagtacctctataaaaactatatacgaatgacataactatcatactagtatcaaagaatgtctaggacgcttaattttcatatgattagattcccctgtatgtgttgtctgtattctgaagctattttctctatcgcattagtgagttcagagtatgtataaagttaaatcgaataacgaacataactttagtaaagtagtgtctataactcttttattttttagccatcataataccatgtttaagatagtattctctagttactacgatctcattgttgtctagaatatcacatacactgaatctacatccaatttctaaaattggtctgtgttaaatcccttctatattattattgatgtattgttgtagaaaactattacttagaccattttctttataaaacgaatatatagtaatccaattatctttaccgatatatttgcacacataatccattctctcaatcactacatctttaagattttggttgttaagatatttggctaaactatataattctattagatcatcaacagaatcagtatatatttttctagatccaaagatgaactctttggcgtcctctataatattatcagaaaagatattttcgtgttttagtttatcaagatctaacctgttcatatccatgattaacgacgttacaataaccgcgtaaaataaaaatccattttcattttttaacacaatactattcataattgagattgatgtaatactttgttactttgaacgtaaagacagtacatggatccgtatctccgacaagcacgtagtaatcaaattttgtgttgttaaattttgcaatattcatcaatttagatagaaacttatactcttcatctgttttaggaatccatgtattaccactttccaacttatcattatcccaggctatatttttgtccatcatcattgcgcagagtgaataattcttctgtatccgacagttcaaatatatgatccatgcatagatcggcaaagctattgtagatgtgatttttcctaaatctagtataacactcgtttactatgaaacactttcctgatttatcgaccaagacacacatggtttctaaatctatcaagtggtggggatccatagttatgacacagtaacatagattattaccttcttgacggtcgcaaatatctatatacttattgttatcgtatcggattctacatatagatggcgtgtatatcaaagatatagaacacataaccaataaaccattgtataatttttatgttttatgtttattcgcgtacacattttggaagtttcggctgccatgtattttccggagagcaagtagatgatgaggaaccagatagtttatatccgtacttgcacttaaagtctacattgtcgttgtatgagtatgatcttttaaacccgctagacaagtatccgtttgatattgtaggatgtggacatttaacaatctgacacgtgggtggatcggaccattctcctcctgaacacaggacaccagagttaccaaccaatgaatatccactattgcaactatacgttacaacgcttccttcggtataaaaatcctcgtatccgttatgtcttccgttggatatagatggaggggattggcatttaacagattcgcaaatgggtgcctcgggattccataccatagatccagtagatcctagttcacaatacgatttagattctccgatcaactgatatccgctattgcaagagtacgttatactagagccaaagtctgttccaccaatatcaagttgaccattatcgatatctcgaggtgatggacatctccgtttaatacattgattaaagagtgtccatccattgcctgtgcatttaacatatatggatcccattttttgctttctgtatccaggtagacatacatattctatagtgtctcctactttgtaagtatcatcagtccccacattattcttaaatttcatattaatgggacgtgacggaatagtacagcatgatagcacgcatcctattcccaacaatgtcagaaacgtcacgctctccaccttcatatttatttatccgtaaaaatgttatcctatgcattgtccaataataaaagtcatgctattgtaggaattttttttcacagttgctcaaaaacgatggtagtgacttatgagttacattacattttggagtctcatctttagtaaacatatcataatattcgatattacgagttgacgtatctaacaaattccaagtatttgattttggataatattcgtattttgcatctgctataattaagatataatcaccacaagaacacacgaacatctttcctacatggttaaagtacatgtataattctatccatttgtcttcattaactatatatttgtatagataattacgagtctcatgagtaattccagtaattgcatagatgtcaccatcgtactctacagcataaactatactatgatgtctaggcatgggagacttttttatccaacgatttttagtgaaacattccacatcatttaatactacatatttctcatacgtggtataaactccacccattacatatatatcatcgtttacgaataccgatgctcctgaatatctaggagtaattaagtttggaagtcttatccatttcgaagcgccatgtttcaaatattctgctacagccgttgaaatagaaaattctaatcctcctattacatataactttccattgttaacacaagtactaacttctgattttaacgacgacatattagtgaccgttttccattttttcgttttaagatctacccgcgatacggaataaacatgtctattgttaatcatgccgccaataatgtatagacaattatgtaaaacatttgcattatagaattgtctatctgtattaccgactatcgtccaatattctgttctaggagagtaatgggttattgtggatatataatcagagtttttaatgactactatattatgttttataccatttcgtgtcacaggctttgtagatttggatatagttaatcccaacaatgctatagcattgcgcatagcattagtcataaacttgggatgtaaaatgttgatgatatctacatcgtttggatttttatgtatccactttaataatattatagctgtaacatcctcatgatttacgttaacgttttcgtgggataagatagttgttagttcatcctttgataattttccaaattctggatcggatgtcaccgctgtaatattgttgattatttctgacatcgacgcattatatagttttttaattccatatcttttagaaaagttaaacatccttatacaatttgtggaattaatattatgaatcatagtttttacacatagatctactacaggcggaacatcaattattatggcagcaactagtatcatttctacattgtttatggtgatgtttatcttcttccagcgcatatagtctaatagcgattcaaacgcgtgatagtttataccattcaatataatcgcttcatcctttagatggtgatcctgaatgcgtttaaacaaattatacggagacgccgtaataatttccttattcacttgtataatttccccattgatagaaaatatcacgctttccattcttgaagtactatagtaattatagtataatgtaaaggtttatatattcaatatttttataaaaatcatttcgacattaattcctttttaaatttgtctatcatctatagaaacatattctatgaatttataaaatgcttttacgtgtcctatcaaatttctacaaaagaatctgttatatggtatagggagagtataaaacattaaatgcccgtacttattaaagtattcagtagccaatcctaactctttcgaatacttattaattgctcttattctgtacgaatctatttttttgaacaacggacctagttgtatatcttgttctatatatctaaaataatgtctgacaagatccattagtttaatatcctcagtcatcttgtctagaatggcgtatctaactgcgggtttaggctttagtttctgtttctatatctacatctttacccaacaccaaaaatataatagctaatattttattacaatatcacgaactaatgtttctttggttatctagtatagtcacgatcagacaaataaataaaatcagatgatcgatgaataatacatttaaattcatcatctgtaagatttttgagatgtctcattaaaatattattagggtcagtactcattatcatatattggcagcagctattacttattttatttttctgtattttattatttttcaccatatagatcaatcattagatcatcaaaatacttttcaatcatcctaaagagtatggcgaacgaatcttcccatctaatttctgaacgtctaccaatgtctctagccactttggcactaatagcgatcattcgcttaacatcttctacattattaactggttgattcaatctatctagcaatggaccgtcggatagcgtcattctcattttcttaatcaatgtatatacatcgtcatcatctaccaattcatcaaacaacataagctttttaaaatcatcattataataggatggatcgccgtcatttctccaaagaatatatctgataagtagagtcctcatgtttagtaatttaactattttagttaacaactatttttatgttaaatcaattagtacaccgctatgtttaatatttattcatattttagtttttaggattgagaatcaatacaaaaattaatacatcatcaattttggaaatacttagtttctacgtagtcaatgaaacatttgagctcatcgtaaaggacgttctcgtacaggacgtaactataaattggtttatatttgttcaagatagatacaaatccgataacttttttgacgaattctacgggatccactttaaaagtgtcataccgggttctttttattcttttaaacagatcgattgtgtgatgtttattaggtcttttacgaatttgatacagaatagcgtttacgtatccaccatagtgatcaatagccatttgttcgtatgtcataaattctttaattatatgacactgtgtattatttagttcgtccttgttcatcattaggaatctatccaatatggcaattatattagaactgtaactgcgttgtgtgcacatgttgatgtgtctgtttatacaatcaattatactaggatccatgccactaccttcgggtaaaattgtagcatcatataccatttctagtactttaggttcattgttatccattgcagaggacgtcatgatcgaatcctaaaaaatatattatttttatgttattttgttaaaaaataatcatcgaatacttcgtaagatactccttcatgaacataatcagttacgaatcgtttatatgaagtaaagtatctacgatttttacaaaagtcaggatgcataagtacaaagtacgcgataaacggaataataatagatttatctagtttatctttttctatcgctttcatagttagatacatagtctcagaagtaggattatgtaacatcagcttcgataaaatgactgggttatttagtctcacacattcgctcatacatgtatgaccattaactacagagtctacactaaaatgattgaacaatagatagtctaccattgtttcgtattcagatagtacagcgtagtacatggcatcttcacaaattatatcattgtctaatagatatttgacgcatcttatggatcccacttcaacagccatcttaaaatcggtagaatcatattgctttcctttatcattaataatttctagaacatcatctctatcataaaagatacaaatattaactgtttgatccgtaataacattgctagccgatagcaatttgttaataagatgcgctgggctcaatgtcttaataagaagtgtaagaggactatctccgaatgtgttttgtttattaacatccgttgatggaagtaaaagatttataatatctacattcttgactgatttagagcatacaatatggagaggtgtatttccatcatgatccgtttttgagggactaattcctagtttcatcatccatgagattgtagaagcttttggattgtctgacataagatgtctatgaatatgatttttaccaaatttatccactattctggcttcgaatccgatagacattatttttttgaacactttttctgaaggatctgtacacgccaacaacggaccacatccttcttcatcaaccgagttgttaatcttggctccatactgtaccaataaatttattctctctatgacttcatcatctgttcccgagagataatatagaggtgttttattctgtttatcgcacgcgtttggatctgcaccgtgtgtcagcagcgttgcaactattctattattattaattttagaagctatatgcaatggataatttccatcatcgtccgtctcatttggcgagtatcctctatgaagaagttcttcaacaaatcgttcatctagtcctttaattccacaatacgcatgtagaatgtgataatttccagaaggttcgattgttcgcagcatattcctaaatacatctaaatttttactattatacttggcataaagatatagataatactcgtctgatataattttgtccattgtagtataaaaattaatatttctatttctgtatatttgcgacaatttactctctataacaaatatcataacttagttcttttatgtcaagaaggcactggtttagttcatctataaatgtcacaccataactaccacgcatgtcatactcagaattatgataaagatatttatccttgggtgcaggtaatggggattaatctttgttggatcagtctctaagttaacacacgtcacacatgatccatttatagttatatcacacgatgatgatttatgaattgattccggaagatcgctatcgcattttgtggttccacaattcatttccatacatgttattgtcacactaatattatgatgaactttatctagtcgctgagtggtaaacaacagaacagatagtttattatcttttccaactccctcagccgccgccacaaatctctgatccgtatccatgatggtcatgtttatttctagtccgtatcctgtcaacactatgttagcatttctgtcgaaatagttttcattcatatgacactcgcccataatagtagaactaatgttgtaatttacaccaatagcgacttcggctgcaaagtaccaaataccggtaatcttgtcgaggaggacacgccgtgttcttgtattctgtcgaatacccgagagatacgatacaaaagagtaagactaatttgtaaaccatcttacacaaaatatgtaacaatagtactatgtaatcaatgagtaataaaacaataggaaccctctatacacgtaattattctatcaattttaccaattagttagtgtagtgttttaacaaaaatgtgggagaatctaattagtttttcttacacaattgacgtacattagtctgagttccttgtttttgctaattatttcatccaatttattattcttgacgatatcgagatcttttgtataggagtcagacttgtattcaacatgcttttctataatcatcttagttatttcggcatcatccaatagtacattttccagattaacagagtagatattaatgtcgtatttgaacagagcctgtagtatttccaggtctttgttatctatagccaatttgatgtcgggaatgaagagaagggaattgttagtgttggtagatgccatatagtcgatcaagagaatcatcatatccacgtgtccattttttatagtgatatggatacaactaaggagaatagctagatcaaaagtagatggtatctctgaaagaaagtatgatacaatacttacatcattaagcatgacggtatgataaaatgaagttttccatccagttttcccatagaacatcagtctccaatttttcttaacaaacagtttcaccgtttgcatgttaccactatcaaccgcataatacaatgcggtgtttcctttgtcatcaaattgtgaatcatccattccactgaatagcaaaatctttactattttggtatcttctaatgtggctgcctgatgtaatggaaattcattctctagaagatttttcaatgctccagtgttcaacaacgtacatactagacgcacgttattatcagctattgcataatacaaggcactatgtccatggacatccgccttaaatgcatctttgctagagagaaagcttttcagctgcttggacttccaagtattaattcgtgacagatccatgtctgaaacgagacgctaattagtgtatatgttttcattttttataattttgtcatattgcaccagaattaataatctctaatagatctgattagtagatatatggctatcgcaaaacaacatatacacttaataaaaataatattcattaaggagattcagattccaccgtacccatcaatataaataaaataatgattcattaccttacccatataaacaatattaaggagattccaccttacccataaacaatataaatccagtaatatcatgtctaatgatgaacacaaatggtgtattaaattccagttctgtaggagatgatctcgccgtagataccatgatagtagatgcctccgctacagttccttgttcgtcgacgtctatctttgcattctgaaacattttatagatatataacgggtccctagtcatatgtttaaacgacgccttatctggattaaacataccaggagcaatcatttcggctatcgacttaatatccctcttattttcgatagaaaatctagggagtttaagattgtacattttattccctaattgagacgaccaatagtctaattttgcagccgtgatagaatctgtgaaatgggtcatattatcacctattgctaggtacatactaatattagtatccttatacggaaggcgcgccatatcatattcttcgtcatcgaccgtgattgtatttccttgcaatttagtaactacgttcatcatgggaaccgttttcgtaccgtacttattagtaaaactagcattgtgtgttttagcgatatcaaacggacattgccacgtacctttaaaatatatagtattaatgattgtccatagagtattatcatcaagcatagtagaatcaactacattagacataccggatctacgttctactatggaattaattttatcaaccggatctcgtctaaagtttaatctatatagaccgaatctatgatattgttgataatacgacggtttaatacacacagtattatctacgaaactttgataagttagatcagtgtacgtatatttagatgttttcagcgtagctaatcctgatattaattctgtaaatgctggacccagatccctttttctcaaatccatagtcttcaatagttctactctagtattacctgatgcaggcaatagcgacataaacatagaaaatgaatagccaaatggcgagaagacaatattatcatcctcattcccatcttgaatatttttatacgctaatataccggcattggtaaatccttgtaggcgataggcggatgctgtacacgctaacgataatatcaataacgcaatcatgattttatggtattaatactttaccttatttttatgtttggtataaaaattattgatgactgtacatccttttgtataatcaagtctaagtactttaacttttacagtttttcctaagtttatccctatattcaacatatctatccatatgcatcttaacactctctgccaagatagcttcagagtgaggatagtcaaaaaagataaatatatagagcataatcattcttgtatactctgccctttattacatcgcccgcattgggcaacgaataacaaaatgcaagcatcttgttaacgggctcgtaaattgggataaacttatgtttttatatctattttattcaagagaatattcgggaatttctttttctggttgtatgtcttcaccgtagatatcatttgtacactgtttcatattttttaatagtctacatcttttagtaggactagtatcgtataattcatagctgtattttgaattccaatcacgaataaaaatatcttccaattgttggcgaagacctaatccatcatctggtgtaatattaatagatgctccacatatatccgtaaagtaatttcctgtccaatttgaggtacctatatacgccgttttatcggttaccatatatttggcatggtttactctagaatatggaatgggaggatcggcatccggtacaataaacagttttacatctatatctatgtttttagattttagcatagctatagatcttaaaaagtttctcataataaacgaagatcgttgccagcaactaatcaatagcttaactgacacttgtctgtctatagcggctcttcttaattcatcttctatataataccaaaacaaaattttacccgccttcgaataaataataggaataaagttcataacagatacataaacgaatttactcgcatttctgatacatgacaataaagcggttaaatcattggttctttccatagtacatagttgttgcggtgcagaagcaataaatacagagtgtggaacaccacttacgttcatactaagaggatgatctgtattatatataatacgcaggataaaagtttctccaattatatggtagattgttaactccaagataccagtatacctcaaaaatttgagtgagatccgctgccaagttcctattattgaagatcgcaatacccaattccttgacctgagttagtgatctccaatccatgttagcgcttcctaaataaatatgtgtattatcagatatccaaaattttgtatgaagaactcctcctaggatatttgtaatatctatgtatcgtacttcaactccggccatttgtagtgtttcaacatcctttaatggtttgttggatttattgacggctactctaacacgtactcctcttttgggtaattgtacaatctcgtttaatattatcgtgccgaaattcgtacccacttcatcagataaactccaataaaaagatgatatatctagtgtttttgtggtattggatagaatttccctccacacgttaaatgtagacaaatatactttatcaaattgcatacctataggaatagtctctgtaatcactgcgatggtattatccggattcattttatttgttaaaaaataatcttataactttactctattaaaaatccaagtttctatttctttcatgactgattttttaacttcgtccgtttccttatgaagatgatgtttggcaccttcataaatttttatttctctattacaatttgcatgttgcatgaaataatatgcacctgaaacatcgctaatctcattgtttgttccctggagtatgagagtcggggtgttaatcttgggaattatttttctaaccttgttggtagccttcaagacctgactagcaaatccagccttaattttttcatgattgactaatgggtcgtattggtatttataaacttcatccttatctctagatactgattctggacatagctttccgactgacacatttggtgtgatggttcccataagtttggcagctagcagattcagtcttggaacagcgtctgcattaactagaggagacattagaatcattgctgtaaacaagtttggattctcgtaagcggccagtatagaaattgttgctcccatggaatgacccaataagaagactggaactcctggataagtagatttaatagtcaccacgtgttgtaccacatctctaacatacgtaccaaagtcatcgatcatcattttttcaccattacttcttccatgtccaatatgatcatgtgaaaatactaaaattcctaacgatgatatattttcagctagttcatcataacgtccagaatgttcaccagctccatggcttatgaataccaatgccttaggatatgtaataggtttccaatatttacaatatatgtaatcattgtccagattgaacatacagtttgcactcataattcacgttatataactatcaatattaacagttcgtttgatgatcatattatttttatgttttattgataattgtaaaaacatacaattaaatcaatatagaggaaggagacggtactgtcttttgtgagatagtcatggagactacatcagattacgaggatgtcgtttttactttgtggatgatgaactatgtagccgtgactccatcatcgatctaatagatgaatatatcacgtggagaaatcatgttatagtgtttaacaaagatattaccagttgtggaagactgtacaaggaattgatgaagttcgatgatgttgctatacggtactatggaattgataaaattaatgagattatcgaggctatgagcgaaggagaccactacatcaatcttacagaagtccatgatcaggaaagtctattcgctaccataggaatatgtgctaaaatcactgaacattgggatacaaaaagatttcagaatctagcttccaatcattgggaaacattacagatctgatgaccgacgataatataaacatcttgatattttttttctagaaaaaaattgaattgatgatatcggattcttcataacgcataaattattacgttaatgtattctatatccagtgttaaaaaaattatcatatcatgtatttgagagtcttatatgtagcaaacatgataacagcaatacccataagctttagatattcacgcgtgctagtggttgcattatctctcggtgtggaaaaaatgtccgttatataatctacaaaataatcatcgcatatagtatgcgatagtagagtaaacatttttatagtttctactggattcatacatcgtctacccagtttggttatgaatgaaattgttatcaatcttacacccaaccccttgttatccattagtatagtattaactttgttatttatgtcataaactgtaaatgattctgtagatgctgcaatatcatcacacatgatatttatgtccctactataatcattattaactttatcacaatacatgttgataatatctatgtatgatctagtttttgtgggcaactgtctatacaagtcgtctaaacgttgtttacccatatagtattgaacagccatcattacatggtcccgttccgttgatagataatcgagtatgttagtggacttgtcaaatctatataccatattttctggaagtggatatacatagttgtgatcatcattatcgctagccttatcctctatatcctgtactataccattatctatatcctgtactataccattatctatatcctgtactataccattatctatatcctgtactataccattatctatatcctgtactataccattatctatatcctgtactataccattatctatatcctgtactataccattatctatatcctgtactataccattatctatatcctgtactataccattatctatatcctgtactataccattatctatatcctgtactataccattatctatatcctgtactataccattatctatatcctgtactataccattatctatatcctgtactataccattatctatatcctgtactataccattatctatatcctgtactataccattatctatatcctgtactataccattatctatatcctgtactataccattatctatatcctgtactataccattatctatatcctgtactataccattatctatatcctgtactataccattatctatatcctgtactataccattatctatatcctgtactataccattatctatatcctgtactataccattatctatatcctgtactataccattatctatatcctgtactataccattatctatatcctgtactataccattatctatatcctgtactataccattatctatatcctgtactataccattatctatatcctgtactataccattatctacgatattatacataaacatcgacaaaatactattgtccattatctaagtccagttgatccaaatccttgagctcctctatctgtactatctagagattgtacttcttccagttctggataatatatacgttgatagattagctgagctattctatctcccgtatttacattgaaagtacattttccattattaataagaatgactcctatgtttcccctataatcttcgtctattacaccgcctcctatatcaataccttttagggacagaccagacctaggagctattctaccatagcagaacttaggcatggacatactaatatctgtcttaattaactgtctttctcccggagggatagtataatcgtaagcgctatacaaatcatatccagcggcgtgatttgattgcctagtaggagatttagctctgttagtttccttaacaaatctaactggtgagttaatattcatgttgaacataaaaatattattttatttcaaaattatttaccatcttatcccattccatatattccatgaataagtgcgattattgtacacttctatagtatctatatacgatccacgataaaatcctcctatcaatagcagtttattatccactatgatcaattctggattatccctcggataaataggatcatctatcagagtccatgtattgctggatccacaataaaattcagcatttctaccaaccaagaataaccttctaccgaacactaacgcgcatgatttataatgaggataataagttgatggtccaaactgccactgattatgattgggtagcaaatattctgtagttgtatccgtttcagaatgtcctcctattacgtatataacattgtttatagacgcgatcgctggattatatctaggtttcagaagactcggcatattaacccaagaagtatctccgtggaaccaacactcgacagatgtgggatttggtagacctcctactacgtataatttattgttagcagctaccccgctagcatacagtctgggactattcatcggaggaattggaatccaattgtttgatgtacaatttaacgctatagcattgttatgtatttcattgttcatccatccaccgatgagatatactacttctccaacatgagtacttgtacacatatggaatatatctataatttgatccatgttcatatgatactctatgaatggatacttgtatgatttgcgtggttgtttatcacaatgaaatattttggtacagtctagtatccattttacattatttatacctctgggagaaagataatttgacctgattacatttttgataaggagtagcaaatttcctaatcgatttcttcgcttcatataccacttaatgacaaaatcaactacataatcctcatctggaacatttagttcattgctttctagaataagtttcatagatagataatcaaaattgtctatgatgtcatcttccagttccaaaaagtgtttggtaataaagtctttagtatgacataagagattggatagtccgtattctatacccatcatgtaacactcgacacaatattcctttctaaaatctcgtatgataaagtttatacaagtgtagatgataaattctacagaggttaatatagaagcacgtaataaattgacaacgttatgactatctatatatacctttccagtatatgagtaaataactatagaagttaggctgtgaatgtcaaggtctagacaaacccttgtaactggatctttattttttgtgtatttttgacgtaaatgtgtgcgaaagtaaggagacaactttttcaatatcgtagaattgactattatattgcctcctatagcctcaataattgttttgaatttcttagtcatagacaatgctaatatattcttacagtacacagtattgacaaatatcggcatttatgtttctttaaaagtcaacatctaaagaaaaatgattgtcttcttgagacataactcccattttttggtattcacccacacgtttttcgaaaaaattagtctttccttccaatgatatattttccatgaaatcaaacggattggtaacattataaatttttttaaatcccaattcagaaatcaatctatctgcgatgaattctatatatgttttcatcatttcacaattcattcctataagtttaactggaagagccacagtaagaaattcttgttcaatagagaccgcgtctgttataatagatcttactgtttcttcactcggtggatacaataaatgtttaaacatcaaacatgcgaaatcgcagtgcagaccctcatctctactaattaattcgttggaaaacgtgagtccgggcattaggccacgctttttaagccaaaatatagacgcaaatgatccagaaaagaagattccttctactgccgcaaaggcaataagtctctctccataaccggcactgtcatgtatccacttttgagcccaatcggccttcttttttacacaaggcatcgtttctatggcattaaagagatagtttttttcattactatctttaacatatgtatcgatcaaaagactatacatttctgaatgaatgttttcaatggccatctgaaatccgtagaaacatctggcctcggtaacctgtacttctgtacaaaatcgttcagctaaattttcgttcactattccgtcactggctgcaaaaaacgccaatacatgttttataaaatatttttcgtccggtgttaatttattccaatcattgatatctttagatatatctacttcttctaccgtccaaaatgatgcttctgcctttttatacatattccagatatcatgatattgaattgggaaaataacaaatctatttggatttggtgcaaggatcggttccataactaaattaacaaatagtagtattttttttcagttatcatctatatgactgtatttggatcttttgtacatcgctatcgccgcaatcactacaataattacaattattattgatagcattgttattagtactatcataattaaattatcgatgtccatgggtgaggaataatcgttatcatcattatcattttgtaattgtgacatcatgctagataaatcatttgtgagattgttgtgggaagggcatggaggatgtattatcgttattatttaacgcctcccattctgattcacaaatatgacgcgcgttcaacattttatggaaacgataattttgtgaaaacaagcaacaagaaaactcgtcatcgttcaaattttaacgatagtaaaccgattaaacgtcgagctaatttctaacgctagcgactctgttggatatgggtttccagatatatatcttttcagctcccctacgtaccacctataatcatctgtaggaaaatggaaggtatgtacatctatctactgttcctaatatcatatatggtggtgtagtagaaccattaagcacgaaagattttatttcgcatcgtattttaacttcgcaataatttctggttagataacgcactctaccagtcaagtcaatgatattagcctttacagatatattcatagtagtcgtaacgatgactccatcttttagatgcgatactcctttgtataaccagaatctttgtatctcagactcgatatatttaaacaagttaatgagatatttactcgttttatgaacgtcgatatatatccagaagttctatcctctgtggctagcgctataaccttatcattataataccaaaagtgtgattagtatgtgatacgtcagtgtgggtacaaatatgtacattatcgtctacgtcgtactcgatgcatccgcatacacccaataaatataaaatgataaatgttctaacaacgctcgtacccatcttgatgcggcttaataagtgttttgatttcaatttattgtaaaaaaagaatcggttttatactgttctagattctcattgattatattctcatctatcatctccacacagtcaaatccgtggttagcatgcacctcatcaaccggtaaaagactatcggactcttctatcattataactcgagaatatctaattcggtcattattaatcaagtcaattatcttatttttaacaaatgtgagtattttactcatttttataaaaaaatttagaaatatacagactctatcgcgtgtctatatcttctttttatatccaatgtatttatgtctgatttttcttcatttatcatatataatggtccaaattctacacgtgtgttgaattcatccagatcattaaggttcttataatcgtaacatccttctcctccctcttctacatcttccttcttattcttattcttattcttagcgtcacggaatctaccacagcaggatcccatgacgagcgtcatattaaactaattcattttcaattataaaatatactgattagtaatgaccattaaaataaatattcttcataaccggtaagaaagtgaaaagttcacattgaaactatgtctatacatcatgaaatgatgatatatatattctattttggtggaggattatatgatataattcgtggataatcattcttaagacacatttcttcattcgtaaatcttttcacgttaagtgagtgtccatattttgcaatttcttcatatgatggcggtgtacgtggacgctgctgttcctgttcttgttgtggccgcctactgtcgtgtttgcgtttagatccctccattatcgcgattgcatagatggagtactattttataccttgtaattaaaattttattaattaaacgtataaaaacgttccgtatctgtatttaagagccagatttcgtctaatagaacaaatagctacagtaaaaataactagaataatcgctacacccactagaaaccacggatcgtaatacggcaatcggttttcgataataggtggaacgtatattttatttaaggacttaacaattgtctgtaaaccacaatttgcgtccgccgatcctgtattaactatctgtaaaagcatatgttggccgggcggagccgaacattctccaatattcaatttttgtatatctataatgttattaacctccgcatacgcattacagttcttttctagcttggatactgcactaggtacatcatctagatctattcctatttcctcagcgatagctcttctatccttttccggaagcaatgaaatcacttcaataaatgattcaaccatgagtgtgaaactaagtcgagaattactcatgcatttgttagttattcggagcgcgcaatttttaaactgtcctataacctctcctatatggatagcacaagtgacattagtagggatagaatgttgagctaatttttgtaaataactatctataaaaagattatacaaagttttaaactctttagtttccgccatttatccagtctgagaaaatgtctctcataataaatttttccaagaaactaattgggtgaagaatggaaacctttaatctatatttatcacagtctgttttggtacacatgatgaattcttctaatgctgtactaaattcgatatctttttcgatttctggatatgtttttaataaagtatgaacaaagaaatggaaatcgtaataccagttatgttcaactttgaaattggtttttattttcttgttaatgattccagccacttgggaaaagtcaaagtcgtttaatgccgatttaatacgttcattaaaaacaaactttttatcctttagatgaattattattggttcattggaatcaaaaagtaagatattatcgggtttaagatctgcgtgtaaaaagttgtcacagcatggcagttcgtaaattttaatgtataacagagacatctgtaaaaagataaactttatgtattgtaccaaagatttaaatcctaatttgatagctaactcggtatctactttatctgccgaatacagcgctaagggaaaaattataatgtttcctctttcgtattcgtagttagttctcttttcatgttcgaaaaagtgaaacatgcggttaaaatagtttataacattaatattactgttaataactgccggataaaagtgggatagtaatttcacgaatttgatactgtcctttctctcgttaaacgcctttagaaaaactttagaagaatatctcaatgatagttcctggccatccatagtttgtatcaataatagcaacatattaagaacccgtttatacagagtatgtaaaaatgttaatttatagtttaatcccatggcccatgcacacacgattaattttttttcgtctccctttagattgttgtatagaaatttgggtactgtgaactccgccgtagtttccatgggactatataattttgtggcctcgaatacaaattttactacatagttatctatcttaaagactataccatatcctcctgtagatatgtgataaaaatcgtcgtttataggataaaatcgtttatccttttgttggaaaaaggatgaattaatgtaatcattctcttctatctttagtagtgtttccctattaaaattcttaaaataatttaacaatctaactgatggagcccaattttggtgtaaatctaattgggacattatattgttaaaatacaaacagtctcctaatataacagtatctgataatctatggggagacatccattgatattcaggggatgaatcattggcaacacccatttattgtacaaaaagccccaatttacaaacgaaagtccaggtttgatagagacaaactattaactattttgtctctgtttttaacacctccacagtttttaatttctttggtaatgaaattattcactatatcagtatcttctttatctaccagagattttactaacttgataacctttgctgtctcattcaatagggtagtgatatttgtatgcgtgatattgatatctttttgaattgtttcttttagaagtgattctttgatggtgtcagcatacgaattacagtaatgcagaaactcggttaacatacaggaattatagtaggcaaattccaattgttgcctgtattgtattagagtgtcaatatgagcaatggtgtcattgcgtttctctgatagaatgcgagcagcaattttggcgttatcatttgacgatatttctggaatgatgaatcctgtttctactaactttttggtaggacaaagtgaaacaatcaagaagatagcttctcctcctatttgtggaagaaattgaactcctctagatgatctactgacaatagtatctccttgacagatattggaccgaattacagaagtacctggaatgtaaagccctgaaacgccctcattttttaagcagattgttgcagtaaatcctgcaccgtgtccaagatagagcgctcctttggtgaatccatctctatgtttcagtttaaccaagaaacagtcagctggtctaaaatttccatctctatctaatacagcatccaacttgatgtcgggaactataaccggtttaatgttatatgtaacattgagcaaatccttaagttcataatcatcgctgttatcagttatgtacgagccaaacaatgtttctactgacatagtggatacgaagatgctatccatcagaatgtttccctgattagtattttctatatagctattcttctttacacgattttccaaatcagtgacgatgttcatttttttaggagtaggacgcctagtcagtatggaagatgattttctagatcctctcttcaacatttttgatctcaatggaatgcaaaaccccatagtgcaacaaccaatggtgtaacaaccgacgataaaaaataatattgtttttcactttttataattttaccatctgactcatggattcattaatatctttatacgagctactaatgtataattctttataactaaactgagatatatacactggatctatggtttccataattgagtaaatgaatgctctgcaataactaatggcaaatgtatagaacaacgaaattatactagagttgttaaagttaatattttctatgagctgttccagtaaattatttgttgtggctgcgttcaagtcataaatcatcttaatactatccagtaaacagtctttaagttctggaatattatcatcccattgtaaagcccctaattcgactatcgaatatcctgctctgatagcagtttcaatatcgacggacgtcaatactgtaataaaggtggtagtattgtcatcatcgtgataaacaacaggaatatggtcattggtaggtactgcgactttacacaacgcgatatataactttccttttgtaccatttttaacgtagttgggacgtcctgcaggatattgttttgaagaaatgatatcgagaacagatttgatacgatatttgttggattcctgattattcactataatataatctagacagatagatgattcgataaatagagaagatatatcgttggtaggataatacatccccattccagtattctcggatactctattgatgacactagttaagaacatgtcttcaattctagaaaacgaaaacatcctacacggactcattaaaacttctagagctcctgattgtgtctcgaatgcctcgtacaaggatttcaaggatgccatagattctttgaccaacgatttaatattgcgtttagcatctgatttttttattaaatcgaatggtcggctctctgatttactgccccaatgatagcaatagtcttgtaaagataagccgcaagaaaatttatactcatccatccagataactctagcaccatcggatgatattagtgtattattatagattttccatccacagttattgggccagtatactgttagcaacggtatatcgaatagattactcatgtaacctactagaatgatagttcgtgtactagtcataatatctttaatccaatctaagaaatctaaaattagatcttttacactgttaaagttaacaaaggtattacccgggtacgtggatatcatatatggtattggtccattatcagtaatggctccataaactgatacggcgatggtttttatatgtgtttgatctaatgaggacgaaattcgcgcccacaattcatctctagatatgtatttaatatcaaacggtaacacgtcaatctcgggacgcgtatatgtttctaaattcttaatccaaatataatgatgacctatatgccctattatcatactgtcgactatagtatacctagagaacttacgatacatctgtttcctgtaatcgttaaattttacaaatctataacatgctaaaccttttgacgacaaccattcattaatttctgatatggaatctgtattctcgataccgtatcgttctaaagccagtgctatatctccctgttcgtgagaacgctttcgtataatatcaatcaacggataatctgaagtttttggagaataatatgacacatgatctatttcgtccataaacaatctacgcataggaattggcggcgacgatcttaattttgtgcaatgagtcaatcctataacttctaatcttgtaatattcatcatcgacataacactatctatgttatcatcgtatattagtataccacgaccttcttcatttcgtgctaaaatggtatacagtcttaaatagttacgcaatatctcaatagtttcataattgttagctgttttcatcaaggttcgtaccctgtttaacatgatggtgttctatacgtctctattttctattttctgcagaattgtcttgacccttttacttgtacagctcgtccatgccgagagtgatcccggcggcggtcacgaactccagcaggaccatgtgatcgcgcttctcgttggggtctttgctcagggcggactgggtgctcaggtagtggttgtcgggcagcagcacggggccgtcgccgatgggggtgttctgctggtagtggtcggcgagctgcacgctgccgtcctcgatgttgtggcggatcttgaagttcaccttgatgccgttcttctgcttgtcggccatgatatagacgttgtggctgttgtagttgtactccagcttgtgccccaggatgttgccgtcctccttgaagtcgatgcccttcagctcgatgcggttcaccagggtgtcgccctcgaacttcacctcggcgcgggtcttgtagttgccgtcgtccttgaagaagatggtgcgctcctggacgtagccttcgggcatggcggacttgaagaagtcgtgctgcttcatgtggtcggggtagcggctgaagcactgcacgccgtaggtcagggtggtcacgagggtgggccagggcacgggcagcttgccggtggtgcagatgaacttcagggtcagcttgccgtaggtggcatcgccctcgccctcgccggacacgctgaacttgtggccgtttacgtcgccgtccagctcgaccaggatgggcaccaccccggtgaacagctcctcgcccttgctcaccatggtgttatgatctacttccttaccgtgcaataaattagaatatattttctacttttacgagaaattaattattgtatttattatttatgggtgaaaaacttactataaaaagcgggtgggtttggaattaggtgaagggtactggatccttagttaacataaaaacttatacatcctgttctaccaacgattctagaatatcatcggctatatcgctaaaattttcatcaaagtcaacatcacaacctaactcagttaatatattaagaagttccacgatttcatcttcgtccatatacatatccaatgcagatggttgactgattatcgagtttaaatcagtactaatatccaatccttcagaatacactctgtgtttcatcgtaatcctccgtatttaagctggtagatttttcaattatgtatcaatatagcaacaacagttcttgctcctccttgattctagcatcctcttcattattttcttctacgtacataagcatgtccaatacgttagacaacacaccgacaatggcggccgccacagacacgaatatgactagaccgaggaccatttaaaaaacactctctagctttcacttaaactgtatagatcattcttttatcacgtgtataataaaaaacattattctatttcgaatttaggcttccaaaaatttttcatccgtaaaccgataataatatatatagacttgttaatagtcggaataaacagattaatgcttaaactatcgtcatctccacgattagagatacaatacttacattctttttgctgtttcgaaactttatcaatacatgttaatacaaacccaggaaggagatattgaaactgaggctgctgaaaatgaaatggcgaatacaatagttcagataatgtaaaatcatgattccgtattctgatgatattagaactgctaatggatgtcgatggtatgtatctaggagtatctattttaacaaagcatcgatttgctaatatgcaattatccttttgattaattgttattttattcatattcttaaaaggtttcatatttatcaattcttctacattaaaaatttccatttttaatttatgtagccccgcaatactcctcattacgtttcattttttgtctagaatatccattttgttcatctcggtacatagattatccaattgataagtgcatttagtagttttgtacattttaagtttattgacgaatcgtcgaaaactagttatcgttaacattttattatttgataccctgatattaatacccctgctgttactattatttataactgatgtaacccatgtaacattggaattaattatcgatagtaatgcatcaacgcttccaaaattgtctattataaactcaccgataatttttttattgcatgttttcatattcattaggattatcaaatctttaatcttatcacgattgtatgcgttgatattacaagacgtcattctaaaagacggaggatctccatcaaatgccagacaatcacgtacaaagtacatagaaataggttttattctattgcgcatcatagattcatatagaacgcctgtagaaatactaatttgttttactctataaaataccaatgcatctatttcatcgttttgtataacttctttccaagtgtcaaactccaaatttttttcattgatagtaccaaaatcttctatctctttaactacttgcatagataggtaattacagtgatgtctacaagctgttttttgaaactgaatcgatgcatctagaagcgatgctacactagtcacaatcaccactttcatatttagaatatatgtatgtaaaaatatagtagaatttcattttgttttttctattctataaatgaattctcattttgcgtctgcccatactccgttttatatcaataccaaagaaggaagatatctggttctaaaggccgttaaagtatgcgatgttagaactatagaatgtgaaggaagtaaagcttcctgcgtactcaaagtagataaaccctcatcgcccgcgtgtgagagaagaccttcgtctccatccagatgcgagagaatgaataaccctggaaaacaagtaccgtttatgaggacggacatgctacaaaatatgttcgccgctaatcgcgataatgtggcggcgagacttttgaactaaaatacaattatatctttttcgatattaataaatccgtgtcgcccgggttttttatctctttcagtatgtgaatagataggtattttatctctattcatcatcgaatttaagagatctgataaacattgtttgtattctcccgatgtcagcatctggtacaataatatatgcgcacataaacctctggcacttatttcatgtaccgtccccttatcactaaggagaatagtatttgagaaatatgtatacatgatattatcatgaattagatatacagagtttgtaacactctcgaaatcacacgaggtgtcggcgttaagatctaatatatcactcgataacacattttcatctagatacactagacattttttaaagctaaaatagtctttagtagtaacagtaactatgcgagtattttcatcgatgatgcatttcatcggcatattattacgagtaccatcaaagactataccatgtgtatatctaacgtattctagcatagttgccatacgcgcattaaacttttcaggatctttggatagatcttccaatctatctatttgagaaaacatttttatcatgttcaatagttgaaacgtcggatccactatatagatattatctataaagattttaggaactacgttcatggtatcctggcgaatattaaaactatcaatgatatgattatcgttttcatcttttatcaccatatagtttctaagatatgggattttacttaatataatattatttcccgtaataaattttattagaaatgccaaatctataagaaaagtcctagaattagtctgaagaatatctatatcgccgtaccgtatatttggattaattagatatagagaatatgatccgtaacatatacaacttttattatgacgtctaagatattcttccatcaacttattaacatttttgactagggaagatacattatgacgtcccattacttttgccttgtctattactgcgacgttcatagaatttagcatatctcttgccaattcttccattgatgttacattataagaaattttagatgaaattacatttggagctttaatagtaagaactcctaatatatccgtgtatgtggtcactaatacagattgtagttctataatcgtaaataatttacctatattatatgtttgagtctgtttagaaaagtagctaagtatacgatcttttatttctgatgcagatgtatcaacatcggaaaaaaatctttttttattcttttttactaacgatacgaatatgtctttgttaaaaacagttattttctgaatatttctagtttgtaattttaacatatgatattcgttcacactgggtaatctacctaaataggtttctataatctttaatgtgatattaggaagagtattctgatcaggattcctattcattttgaggatttaaaactctgattattgtctaatatggtctcaacacaaactttttcacagagcgatagagtttttgataactcgtttttcttaagaaatataaaactactgtctccagagctcactctatcttttattttatctaattcgatacaaactcctgatactggttcagaaagtaattcattaattttcagtcctttatagaagatagttaatatagataatacaaaatcttcagttcttgatatcgatcggattgatcctagaactagatatattaataaagtactcattaggcagtttatggcagcttgataattagatatagtatattccagttcatatttattagataccacattgcccagattttgatattctatgaattcctctgaaaataaatccaaaataactagacattctattttttgtggattagtatactctcttccctctatcatgttcactactggtgtccacgatgacaaatatctagagggaatataatatagtccataggatgccaatctagcaatgtcaaataactgtaattttattcttcgctcttcattatgaattaattcttgaggtataaacctaacacaaattttattattagacttttcgtatgtaatgtctttcatgttataagtttttaatcctggaatagaatctatcttaatgaggcttttaaatgcggagttctccaacgagtcaaaacataatactctgttgtttttcttatatataatattacgattttcttctttgaatggaataggtttttgaattagtttataattacaacataatagataaggaagtgtgcaaatcgtacgcggaaaaaacataatagctcccctgttttcatccatggttttaagtaaatgatcactggcttccttagtcaatggatattcgaacattaaccgtttcatcatcattgggcaaaatccatatttcttaatgtaaagagtaatcaactcattgtgtttattgtaccatcttgttgtaaatgtgtattctgttatcggatctgctcctttttctattaatgtatcgatgtcgatctcgtctaagaattcaactatatcgacatatttcatttgtatacacataaccattactaacgtagaatgtataggaagagatgtaacgggaactgggtttgttgattcacaaactattctaatacatagttcttctgttaatacgtcttgcacgtaatctattatagatgccaagatatctatataattattttgtaagatgatgttaactatgtgatctatataagtagtgtaataattcatgtatttggatatatgttccaactcggtctttgtaatctctagtttcgtaatatctatagcatcctcaaaaaatatattcgcatatattcccaagtcttcagttctatcttctaaaaaatcttcagcatatggaatataataatctattttgcctcttctgatgtcattaatgatatagtttttgacactattttccatcaattgattcttattcactatgtctaaaaaccggatagcgtccctaggacgaactactgccattaatatctctattatagcttctggacataattcatctattataccagaattaatggtaactattccgtatctatctaacatagttttaagaaagtcagaatctaagacctgatgttcatatattggttcatacatgaaatgatctctattgatgatagcgactatttcattctctgaaaattggtaactcattctatatatgctttccttgttgataaaggataggatatactcgatggaatttgtaccaacaaactgttctcttatgaatcgtatatcatcatctgaaataatcatgtaaggcatacacttagcaattagtgacttgtctcctgttatcaatatactattcttgtgataatttatgtgtgaggcaaatttgtccacgttttttaattttgttatagtggatatcaaatccaatggagctacagttcttggcttaaacagatatagtttttctggaacgaattctacaacattattataaagaactttgggtagataagtgggatgaaatcctactttaattaatgcgatcgccttgtcctcatgtaaatatccaaacgcctttgtgatagtatggcattcattatctagaaacgctctacgaatatctgtaacagatatcatctttagagaatactagtcgcattaaaagtactaaaatttgtattttttaatctatcgcaataaaaaaattaatatttatgaattcaatgtataactagaacataatcagaatctaatgatgacgtaaccaagaagtttatctacagccaatttagctgcattatttttagcatctcgtttagtttttccatcggccttatcgaatactcttccatcgatgtctacacatgcataaaatataggagagttactaggtcccactgattcaatacgaaaagaccaatctctcttagttatttgacagtactcattaataatggtgacagggttagcatttttccaatcaataatttttttagccggaataacatcatcaaaagacttatgatcctctctcattgatttttcgcgggatacatcatctattatggcatccgccatagtattagtatccggcttatccgcctccgttgttataaaccaacgaggaggaatatcgtcggatctgtacaccatagcactgcgttgaagatcgtacaaagctttattaacttctcgcttctccatattaagttgtctagttagttgtacagcagtagctccttcgagtccaatgtttttaatagcctcgcatacaatcgctgcgtcagaacactcgtcaatatagatcttagacatttttagagagaactaacaccaccagcaataaaactgaacctactttatcattttttttattcatcatcctctggcggttcgtcgttcctatcgaacgtggctctgattaacccgtcatctataggtgatgccggttctggagattctggaggagatggattattatctggaagaatctctgttatttccttgttttcatgtatcgattgtgttgtaacattaagattgcgaaatgctctaaatttgggaggcttaaagtgttgtttacaatctctacacgcgtgtctaactaacggaggttcatcagctgctctagtttgaatcatcatcggtgtagtattcctacttttacagttgggacacggtgtattgtatttctcgtcgagaacgttaaaataatcgttgtaactcacatcctttattttatctatattgtattctactcctttcttaatgcattttataccgaataagagatatcgaaggaattctttttcggtgccgctagtacccttaatcatatcacatagtgttttatattccaaatttgtggcaatagacggtttatttctatacgatagtttgtttctggaatcctttgagtattctataccaatattattctttgattcgaatttagtttcttcgatattagattttgtattacctatattcttgatgtagtactttgatgatttttccatggcccattctattaagtcttccaagttggcatcatccacatattgtgataataattctcggatatcagtagcggctaccgccattgatgtttgttcattggatgagtaactactaatgtatacattttccatttataacacttatgtattaactttgttcatttatattttttcattattatgttgatattaacaaaagtgaatatatatatatgttaataattgtattgtggttatacggctacaatttcataatgagtggaagtcagtgtcggatgatcaacgacgatagctttactttgaaaagaaagtatcaaatcaatagtgtggagtcaacaatgaaaatggataagaagaggacaaagtttcagaatagagccaagatggtaaaagaaataaaccagacaataagagcagcccaaactcattacgagacattgaaactaggatacataaaatttaagagaatgattaggactactactctagaagatatagcaacatctattccaaatattcagaaaatttataaactattctcagacatttcagccattggaaaagcatcacagaatccgagtaagatggtatatgctctactgctttatatgtttcccaatttgtttggagacgatcatagattcattctttatagaatgcatccaatgagcaaaatcaaacacaagatcttctcaccgttcaaacttaatcttattaggatattagtggaagaaagattctataataatgaatgcaaagattatagatggaaaataattggatcacaagttgataaaatattgatagctgaatctgctaaatatacaatgaatgcaatgtatcgcctaagaccgatacatagaatcaaggtagaatctgaagaagataccctcttcatcaaacagatggtagaaaaatgtgtaacatcccaggaattggtggaaaaaatgttgaagatactgtttagagatttgttcaagagtggagaatacaaagcgtacaggtacgatgatgatgtagaaaatggattcattggattggataaactaaaattaaacattgttcatgatatagttgaaccatgtatgcctgtccgcaggccagtggctaagatactgtgtaaagaaatggtaaataaatactttgagaatccgctacatattattggtaagaatcttcaagagtgcattgactttgttagtgagtagacattcatctttctcctttctccaatactaattcaaattgttaaattaataatggatagtataaaatagttattagtagtaagataagataagataagataagataagataagataagataagataagataagatagtaaaaataattattagaataagagtgtagtatcatagataagtatttactctcttctataaaaatggattttattcgtagaaagtatcttatatacacagtagaaaataatatagattttttaaaggatgatacattaagtaaagtaaacaattttaccctcaatcatgtattagctctcaagtatctagttagcaattttccccaacacgttattactaaggatgtattagataataccaatttttttgtttttatacatatggtacgatgttgtaaagtatacgaggcggttttacgacacgcatttgatgcacccacattgtatgttaaagcattgactaagaattatttatcgtttagtaacgcaatacaatcatacaaggaaaccgtgcataaactaacacaggatgaaaaatttttagaggtagctgaatacatggaagaattaggagaacttataggcgtaaattatgacttagttcttaatccattatttcacggaggggaacccatcaaagatatggaaatcatttttttaaaactgtttaagaaaacagacttcagcattgttaaaaaattaagtgttataagattacttatttgggcatacctaagcaagaaagatacgggcatacagtttgcggataatgatagacaagatatatatactctatttcaacaaactggtagaatagtccatagcaatctaacagaaacgtttagagattatatctttcccggagataagactagctattgggtgtggttaaacgaaagtatagctaatgatgcggatatcgttcttaatagacccgccattaccatgtatgataaaattcttagttatatatactctgagataaaacagggacgcgttaataaaaacatgcttaagttagtttatatctttgagcctgaaaaagatatcagagaacttctgctggaaatcatatatgatattcctggagatatcctatctattattgatgcaaaaaatgacgattggaaaaaatattttattagtttttataaagctaattttatcaacggcaatacatttattagtgatagaacatttaacgaggacttattcagagttgttgttcaaatagatcccgaatatttcgataatgaacgaattatgtctttattctctacgagtgctgcggacattaaacgatttgatgagttagatattaataaaagttatatatccaatataatttatgaggtgaacgatatcacattagatacaatggatgatatgaagaagtgtcaaatctttaacgaggatacgtcgtattatgttaaggaatacaatacatacctgtttttgcacgagtcggatcccatggtcatagataacggaatactaaagaaactgtcatctataaaaaccaagagtaaacgactgaacttgtttagcaaaaacattttaaaatattatttagatggacaattggctcgtctaggtcttgtgttagatgattataaaggagacttgttagttaaaatgataaaccatctcaagtctgtggaggatgtatccgcattcgttcgattttctacagataaaaaccctagtattcttccatcgctaatcaaaactattttagcgagttataatatttccatcattgtcttatttcaaaggtttttaagagataatctatatcatgtagaggaattcttggataaaagcatccatctaaccaagatggataagaaatatatacttcaattgataaggcacggtagatcatagaacaaaccaaacatattattaataatttgtatatacatagatataattatcacatattaaaaattcacacattttggtaaatgggaactgctgcaaccattcagactcccaccaaattaatgaataaagaaaatgcagaaatgattttggaaaaaattgttgatcatatagttatgtatattagtaacgaatcaagagatgtaaataatcctgaatatattgattttcgtaacagatacggagactatagatctctcattataaaaagtgatcacgagtttgtaaaactatgtaaaaatcatgcgaagaaaagttctccagaaacacaacaaatgattatcaaacacatctacgcacaatatcttattccggtatctgaagtactattaaaacctatgatgaccatgggtgacataattacatataacggctgtaaagacaatgaatggatgctacaacaactctctaccctaaactttaacaatctccacacgtggaactcgtgtagcataggcaatgtaacgcgtctgttttatacattttttagttatctgatgaaagataaactagatatataagtataatcccattctaatactttaacctgatgtattacctgcatcttattagaatattaacataactaaaagacataacataaaaacttattacatagttgataaaaagcggtaggctataaatattatggctacagttgttccgcgtgttgacgatgtgtacaaaaatgcacaaagaagaattctagatcaagaaacattttttagtagaggtctaagtagaccgttaatgaagaacacatatctatttgataattacgcgtatggatggataccagaaactgcaatttggagtagtagatacgcaaacctagatgctagtgactattatcccatttcgttgggattacttaaaaagtttgagtttctcatgtctctatataaaggtcctattcccgtatatgaagaaaaagtaaatactgaattcattgctaatggatctttctccggtagatacgtatcatatcttagaaagttttctgcccttccaacaaacgagtttattagttttttattattgacctccatccctatctataatatcttattctggtttaaaaacacacagtttgatattactaaacacacattattcagatacgtctatacagataatgccaaacacctggcgttggctaggtatatgcatcaaacaggtgactataagcctttgttcagtcgtctcacggagaattatatatttaccggtcctgttccgataggaatcagagatatagatcaccctaatcttagtagagcaagaagtccatccgattatgagacattagctaatattagtactatattgtactttaccaagtatgatccggtattaatgtttttattgttttacgtacctggatattcgattactacaaaaattactccagcagtagaatatctaatggataaactgaatctaacaaagagcgatgtacaactgttgtaaattattttatgcttcgtaaaatgtaggtcttgaaccaaacattctttcaaagaatgagatgcataaaactttattatccaatagattgactatttcggacgtcaatcgtttaaagtaaacttcgtaaaatattctttgatcgctgccgagtttaaaacttctatcgataattgtttcatatgttttaatatttacaagttttttggtccatggttcattagctggacaaatatatgcaaaataatatcgttctccaagttctatagtctctggattatttttattatattcagtaaccaaatacatattagggttatctgcggatttataatttgagtgatgcattcgactcaacataaacaattctagaggagacgatctactatcaaattcggatcgtaaatctgtttctaaagaacggagaatatctatacatacctgattagaattcatccgcccttcagataacatttcagacagtctggtcttgtatatcttaatcatgttcttatgaaacttggaaacatctcttctagtttcactagtacctttattaattctctcaggtacagattttgaattagacgatgccgagtatttcatagttgtatatttctttttcgattgcataatcagattcttatataccgcctcaaactctattttaaaattattaaacaatactctactattaatcaatcgttctaactcctttgctatttctatggacttatctacatcttgactgtctatctctgtaaacacggagtcggtatctccgtacacgctacgaaaacgaaatctgtaatctatagacaacgatgttttcacaatcggattaatatctctatcgtccatataaaatggattacttaatgggttggcaaatcgtaacataccatcagataactctgctccatttagtaccgattctagatacaagatcattctacgtcctatggatgtgcaactcttagccgaagcgtatgagtatagagcactgtttctaaatcccatcagaccatatactgagttggctactatcttgtacgtatattgcatggaatcatagatggccttttcagttgaactggtagcctgttttagcatctttttatatctggctctctctgccaaaaatgttctcaatagtctaggaatggttccttctatcgatctatcgaaaattgctatttcagagatgaggttcggcagtctaggttcacaatgaaccgtaatatatctaggaggtggatatttctgaagtaagagctgattatttatttcttcttccaatctattggtactaacaacgacaccgactaatgtttccggagatagatttccaaagatacacacattaggatacaggctgttataatcaaagattaatacattattactaaacattttttgttttggagcaaataccttaccgccttcgtaaggaaacttttgttttgtttctgatctaactaagatagttttagtttccaacaatagctttaacagaggacccttgatgactgtactcgctctatattcgaataccatggattgaggaagcacgtatgttgatgcacccgcgtctgtttttgtttctactccgtaatactcccacaaatactgacacaagcaagcatcgtgaatacagtatctagccatatctaaagctatgtttagattataatccttatacatctgagctaaatcaacgtcatcctttccgaaagataatttatacttatcatttgttaaagtgggacacgatagcacgactttgaatccattttcccaaatatctttatgaattactttacatataatatcctcattaaccgtcacataattacctgtagttaaaacctttgcaaatgcagcggctttgcctttcgcgtccgtagtatcgtcaccgatgaacgtcatttctctaactcctctattcaacactttggtcatacaaccaaaagcgttcttggctatagaatccaatttgtacgaatccaatttttcagatttttgaatgaatgaatatagatcgaaaaatatagttccattattgttattaacgtgaaacgtagtattggccatgccacctactcccttatgactagactgatttctctcataaatacagagatatacagcttcctttttgtctggagatctaaagataatcttctctccggttaataactctagacgattagtaatatatctcagatcgaagttatgtccgttaaaagtaacgatatagtcgaacgttagttccaacaattgtttagctatttgtaacaaaactatttcagaacatagaactagttctcgttcgtaatccatttccatcagtgactgtatcctcaaacatcctctatcgacggcttcttgcatttcctgttccgttaacatctcttcattaatgagcgtaaacaataatcgtttgccacttaaatcgatatagcagtaacttgtatgtgagattggattaataaatacagaaggaaacttcttatcgaagtgacactctatatctagaaataagtacgatcttgggatatcaaatctaggtatttctttagcaaaacagttacgtggatcgtcacaatgataacatccattgttaatctttgtcaaatattgctcgtccaacgagtaacatccgtctggagatatcccgttagaaatataaaaccaactaatattgagaaattcatccatggtggcattttgtatgctgcgtttctttggctcttctatcaaccacatatctgcgacggagcattttctatctttgatatctagattataacttatcgtctcgtcaatgtctatagttctcatctttcccatcggtctcgcattaaatggaggaggagccaatgcctgatatatttcgtcactcactacgtaataaaagtaatgaggaaatcgtataaatacggtctcaccatttcgacatctggatttcagatataaaaatctgttttcgccacgactttcgaaccaattaatgcaccgaacatccatttctagaatttagaaatatattttcatttaaatgaatcccaaacattggggaagagccgtatggactattatttttatagtactttctcaagcgggtttagatggcaacatagaagcgtgtaaaagaaaactatatactatagtcagcactcttccatgtcctgcatgtagacgacacgcaactatcgctatagaggacaataatgtcatgtctagcgatgatctgaattatatttattattttttcatcagattatttaacaatttggcatctgatcccaaatacgcgatcgatgtgacaaaggttaaccctttataaacttaacccattataaaacttatgattagttacgactgaaataacagcgtaattattttttggtataattctacacggcatagtttctgtaactatgaattcaacacccattatcttagtgaaatctttaacaaacagtaagggttcgtcaaagacataaaactcattgtttacgatcgaaatagatcccctatcacacttaaaataaaaaatatccttatcctttatcaccaaataaaattctgattggtcaatgtgaatgtattcacttaacagttccacaaatttatttattaaccccgaggcacatacatcgtcggtattttttatggcaaactttacgcgtccagcatccgtttctaaaaaaatattaacgagttccatttatatcatccaatattattgaaatgacgttgatggacagatgatacaaataagaaggtacggtacctttgtccaccatctcctccaattcatgctctattttgtcattaactttaatgtgtgaaaacactactccacatgcttccatgacagtgtgtaacactttggatacaaaatgtttgacattagtataattgtccaatactgtcaatctataatagatagtagctataatatattctatgatggtattgaagaagatgacaaccttggcatattgatcatttaacacagacatggtatcaacagatagcttaaatgaaagagaatcagtaattggaataagcgtcttctcgatggagtgtccgtataccaacatgtctgatattttgatgtattccattaaattatttagttttttctttttattctcgttaaacagcatttctgtcaatagaccccaacatcgttgaccgattaagttttggttgatttttccatgtaaggcgtatctagtcagatcgtatagcctatccaataatccatcgtctttgtgtagatcacatcgtacactttttaattctctatagaagagcgacagacatctggaacaattacagacagtaatttctttattctctacagatgtaagatacttgaagacatccctatgatgatgtagaattttggataacacggtattgatggtatctgttaccataatacctttgatggctgatagtgtcactgcacaagatttccaatctttgacaattttcagcaccattatctttgttttgatgtctatatcagacagcatggtgcgtctaacaacacagggattaagacggaaagatgaaatgattctctcaacatcttcaatagatatcttactattttttctggcattatctatatgtgtgagaatatcctctagagaatcggtatcctttttgatgatggtggatctcaacgaaatgggacgtctaaaccttcttattctatcaccagattgcatggtgatttgtcttctttcttttatcatgatgtaatctctaaattcatcggcaaattgtctatatctaaaatcataatatgagatgtttacctctacaaatatctgttcgtccaatgttagagtatctacatcagttttgtattctaaattaaacatggcaacggatttaattttatattcctctattaagtcctcgtcgataataacagagtgtagataatcatttaatccgtcgtacatggttggaagattttcgttaacaaaatctttaattgtcttgatgaatgtgggactatatctaacatcttgattaataaaatttataacattttccataggatactttgtaactagttttatacacatctcttcatcggtaagtgtagacagaatatcgtgaacaggtggtatattatattcatcagatatacgaagaacaatgttcaaatctagattgtttaatatattatatagatgtagtgtagctcctatagggatatctttaactaagtcaattatttcatcaaccgttagatctattttaaagttaatcatataggcattgatttttaaaaggtatgtagccttgactacattctcattaattaaccattccaagtcactgtgtgtaagaagattatattctatcataagcttgactacatttggtcccgataccattaaagaattcttatgatataaggaaacagcttttaggtactcatctactctacaagaattttggagagccttaatgatatcggtgacgtttattatttcaggaggaaagaacctaacattgagaatatcagaattaatagcttccagatacagtgattttggcaatagtccatgtaatccataatccagtaacacgagctggtgcttgctagacaccttttcaatgtttaatttttttgaaataagctttgataaagccttcctcgcaaattccggatacatgaacatgtcgccgatatgaatgagtttttttcagtattttatatttttctcaacaagttctcaatacaccaatagatgatagaatatcacccaatgcgtccatgttgtctatttccaacaggtcgctatatccaccaatagaagttttcccaaaaaagattctaggaacagttttaccaccagtaatttgttcaaaatagtcgcgcaattcattttcgggtttaaattctttaatatcgacaatttcatacgctcctcttttgaaactaaacttatttagaatatccagtgcgtttctacaaaaaggacatgtatacttgacaaaaattgtcactttgttattggccaacctttgttgtacaaattcctcggccattttaatatttaagtgatataaaactatctcgacttatttaactctttagtcgagatatatggacgcagatagctatatgatagccaactacagaatgcgaacgctataaaaaacataattacaacgagcatttataaatatttttattcagcattacttgatatagtaatattaggcacagtcaaatattcaaccactctcgatacattaactctctcattttctttaacaaattctgtaatatcttcgtaaaaagattcttgaaactttttagaatatctatcgactctagatgaaatagcgtttgtcaacatgctatgttttgtgtacataaatgcgcccattttaacagtttctagtgacaaaatactagcgatcctaggatcctttagaatcacatagattgacgactcgtctctcttagtaaccctagtaaaataatcatacaatctagtacgtgaaataatattatccttgacctgaggagatctaaacaacctagttttgaggacatcgataagttcatcgggaatgacatacatactatctttaatagaactcttttcatccagttgaatggattcgtccttaaccaactgattaatgagatcttctattttatcattttccagatgatatgtatgtccattaaaggtaaattgtgtagcgcttctttttagtctagcagccaatactttaacatcactaatatcgatatacaaaggagatgatttatcgatggtattaagaattcgtttttcgacatccgtcaaaaccaattcctttttgcctgtatcatccagttttccatcctttgtaaagaaattattttctactagactattaataagactaataaggattcctccgtaattgcacaatccaaactttttaacaaaactagactttacaagatctacaggaattcgtacttcaggtttcttagcttgtgattttttcttttgcgggcattttctagtgaccaactcatctaccatttcattgattttagcagtgaaataagctttcaatgcacgggcactgatactattgaaaatgagttgatcatcaaattccgccatttaagttcaccaaacaacttttaaatacaaatatatcaatagtagtagaataagaactataaaaaaaataataattaaccaataccaaccccaacaaccggtattattagttgatgtgacagttttctcgtcacttagaacagatttaacaatttctataaagtctgtcaaatcatcttccggagaacccataaatacaccaaatatagcagcgtacaacttatccatttatacattgaatattggcttttctttatcgctatcttcatcatattcatcttcaatatcaacaagtcccaggttacgagccagatcttcttctacattttcagtcattgatacacgttcactatctccagagagtccgataacgttagccaccacttctctatcaatgattagtttcttgagagcgaaagtaatttttgtttctgttccggatctatagaagacgataggtgtgataattgccttggccagttgtctttctcgtttacccagtgcttctagttcgccttctatagatctgagaatagatgattctccagccgaaacatattctaccatggctccgtttaatttgttgatgaagatggattcatccttaaatgttttctctgtaatagtttccaccgaaagactatgcaaagaatttggaatgcgttccttgtgcttaatgtttccatagacagcttctagaagttgatacaacataggactagccgcggtaacttttatttttagaaagtatccatcgcttctatcttgtttagatttatttttataaagtttagtctctccttccaacataataaaagtggaagtcatttggctagataaactatcagtaagttttatagagatagacgaacaattagcatattgagaagcatttagtgtaacgtattcgatacattttgtattagatttactaatcgattttgcatactctataacaccagcacaagtctgtagagaatcgctagatgctgtaggtattggtgaagtttcaactctcttcttgattaccttactcatgattaaacctaaataattgtactttgtaatataatgatatatattttcactttatctcatttgagaataaaaatgtttttgtttaaccgctgcatgatgtacagatttcggaatcgcataccatggacggttttattttttccttgtccaatgtaaactgaatgggagaggatgcggctttcgtacgtagatagtacatgcctgtttttagaccgagactccatccgtaaaaatgcatactcgttagtttggaatagctaggatcggctatgtgaatattcatcgactgactttgatcgatgaaggctcccctgtctgcagccatttttatgatcgtcttttgtggaatttcccaaatagttttataaactcgcttaatatcttctggaaggtttgtattctgaatggatccaccatctgcaataatcctatttttgatctcttcattccataattttctctcggttaaaactctaaggagatgaggattaactacttgaaattctccagacaatactctacgagtgtaaatattactggtatacggttccactgactcattatttcccaaaatttgagcagttgatgcagtcggcataggtgccaccaatagactatttctaagaccatgtgatcggattttatcttttagagattcccaattccaaagatccgatggtacaacattccaaagatcgtattgtagaatgccgttactagcgtatgatcctgcatatgtatcgtatggtccttctttttcggctagttcacaactcgcctctaatgctccataataaatggtttcgaaaatcttcttattgagatcttgtgcttccgggctatcaaatggataatttaagagaataaacgcgtctgctaatccttgaacgccaataccgataggtctgtgtctcttattagaaatttcagcttctggaataggataataattaatatctataattttattgagatttctgactattactttgaccacatcctttagtttgagaaaatcaaatctcccatctattacaaacacgttcaaggcaacagatgccagattacaaacggctacctcattagcatcggcatattgtataatttcagtgcaaagattactacacttgatggttcctaaattttgttgattactctttttgttacacgcatccttataaagaataaacggagtaccagtttcaatctgagattctataatcgctttccagacgactcgagcctttattatattcttgtatctcttttctctttcgtattgtgtatataatcgttcgaactcgtctccccaagcattgtctaatccaggacattcattcggacacatcaatgaccactctccatcatcatttactcgtttcataaagagatcaggaatccaaagagctataaatagatctctggttctatgctcctcgtttcctgtattctttttaagatcgaggaacgccataatatcagaatgccacggttccaagtatatggccataactcccggccgtttgtttcctccctgatctatgtatctagcggtgttattataaactctcaacattggaataataccattggatgcaccattggtcccggagatatagcttccactggcacgaatattgctaattgatagacctattccccctgccattttagagattaatgcgcatcgttttaacgtatcatagatgccctctatactatcatccatcatgttaagtagaaaacagctagacatttggtgacgactagttcccgcattaaataaggtaggagaagcgtgcgtaaaccatttttcagacagtagattgtacgtctcaatagctgattctatatcccattgatgtattcctaccgcgacacgcattaacatatgctgaggtctttcaacgatcttgttatttattttcaacaagtaggatttttccaaagttttaaaaccaaaatagttgtatgaaaagtctcgttcgtaaataataaccgaattgagtttatccttatatttgttaactatatccatggtgatacttgaaataatcggagaatgtttcccatttttaggattaacatagttgaataaatcctccatcacttcactaaatagtttttttgtttccttgtgtagatttgatacggctattctggcggctagaatggcataatctggatgttgtgtagtacaagtggctgctatttctgctgccagagtgtccaattctaccgttgttactccattatatattccttggataaccttcatagctattttaataggatctatatgatcagtgtttaagccataacataattttctaatacgagacgtgattttatcaaacataacattttcccggcatccatttcgtttaacgacaaacatttttgtcggtgtagtaaaaaatttatttaacttttcattaatagggacttgacgtacgtagcgtacaaaatgatcgttcctggtatatagataaagagtcctatatatttgaaaatcgttacggctcgattaaactttaatgattgcattgtgaatatatcattaggatttaactccttgactatcatggcggtgccagaaatcaccatcaaaagcattaatacagttatgccgatcgcagttagaacggttatagcatccgccatttatatctaaaaattagatcaaagaatatgtgacaaagtcctagttgtatactgagaattgacgaaacaatgtttcttacatattttttttttattagtaaccgacttaatagtaggaactggaaaactagacttgattattctataagtatagatgcccttccagataatattctctttgataaaagttccagaaaatgtagaattttttaaaaagttatcttttgctattaccaatattgtggttagacgcttattattaatatgagtgatgaaatccacaccgcctctagatatcgcttttatttccacattagatggtaaatccaatagtgaaactatttttttaggaatatatggactcgcatttagaggagtgaacgtcttaggcgtcggaaagaatgattcgtcaaacgaataaacaatttcacaaatggatgttaatgtattagtaggaaatttcttgacgctagtggaattgaaaattctaatggatgatgttctacctatttcatccgataacatgttaatttccgacactaacggttttaatatttcgatgatatacggtagtctctctttcggacttatatagcttattccacaatacgagtcattgtatactccaaaaaataaaataacgagtataaagtctgtatcgaatgggaaaaatgaaattatcgacataggtatagaatccggaacattgaacgtattaatacttaattctttctcagtggtaagaaccgataggttattgacattgtatggttttaaatattctataacttgagacttgatagatattaatgacgaattgaaaattatttttatcaccacgtgtgtttcgggatcatagtcgacgcccgtcaaccaaccgaatggagtaaaataaatatcattaatatatgctctagatattagtatttttattaatcctttgattatcatcttctcgtacgcgaatgattccatgatcaagagtgatttgagaacatcctccggagtattaatgggcttagtaaatagtccatcgttgcaataataaaagttgtccaagttaaaggatattatgcattcgtttaaagatatcgcctcatctgacggagacaattttttggtaggttttagagactttgaagctacttgtttaacaaagttattcatcgtcgtctactattctatttaattttgtagttaatttatcacatatcacattaattgactttttggtccatttttccatacgtttatattcttttaatcctgcgttatccgtttccgttacatccagtgatagatcttgcaagttaaatagaatgctcttaaataatgtcattttcttatccgctaaaaatttaaagaatgtataaacttttttcaaagatttgaaacttttaggaggagttctaatgcacaatatcataaacaaactaataaacatcccacattcagattccaacaattgattaacttccacattaatacagcctattttcgctccaaatgtatattcgaaaaatctgaataaaacatcaatgtcgcaatttgtattgtccaatacagaatgtcggtgattcgtgttaaaaccatcggagaaggaatagaaataaaaattattatagtggtggaattcagttggaatattgcctccggagtcataaaaggatactaaatattgttttttatcataaattacacatttccaatgagacaaataacaaaatccaaacattacaaatctagaggtagaacttttaattttgtctttaagtatatacgataagatatgtttattcataaacgcgtcaaatttttcatgaatcgctaaggagtttaagaatctcatgtcaaattgtcctatataatccacttcggatccataagcaaactgagagactaagttcttaatacttcgattgctcatccaggctcctctctcaggctctattttcatcttgacgacctttggattttcaccagtatgtattcctttacgtgataaatcatcgattttcaaatccatttgtgagaagtctatcgccttagataccttttctcgtagtcgaggtttgaagaaatacgccaacggtacactagtaggtaactcaaatacatcgtatatagaatggtagcgcgtctttaactcgtcggttagctctttcttttgatcgagttcgtcgccactattgggtctactcaagtgcccagactctactagttccagcatcataccgataggtatacaagacactttgccagcggttgttgatttatcatatttctccactacatatccgttacaatttgttaagaatttcgatacatctatattgctacataatccagctagtgaatatatatgacataataaattggtaaatcctagttctggtattttactaattactaaatctgtatatctatccatttatcatggaaaagaatttaccagatatcttcttttttccaaactgcgttaatgtattctcttacaaatattcacaagatgaattcagtaatatgagtaaaacggaacgtgaaagtttctcattggcagtgtttccagtgataaaacatagatggcataacgcacacgttgtaaaacataaaggaatatacaaagttagttcagaagcgcgtggagaaaaagtatctcccccatcactaggaaaacctgtttatataaacctaactacgaggcaatatatatacagtgagtatacaataagctttgaatgttatagttttctaaaatgtataacaaatacagaaatcaattcgttcgatgagtatatattaagaggactattagaagctggtaatcagttacagatattttccaattccgtgggtaaacgaacagatactataggtgtactagggaataagtatccatttagcaaaattccattggcctcattaacccctaaagcacaacgagagatattttcagcgtggatttctcatagacctgtagttttaactggaggaaccggagtgggtaagacgtcacaggtacccaagttattgctttggtttaattatttatttgggggattctctactctagataaaatcactgactttcacgaacgaccagtcattctatctcttcctaggatagctttagttagattgcatagcaatactattttaaaatcattgggatttaaggcactaaatggatctccgatttctttacgatatggatctataccggacgaattaataaacaaacatccaaaaaaatatggaattgtattttctacccataagttatctttaacaaaactatttagttatggcactcttattatagacgaagttcatgagcatgatcaaataggagatatcattatagcagtagcgagaaagcatcatacgaaaatagattctatgtttttaatgactgccacgttagaggatgacagggaacgtctaaaagtatttttacccaatcccgcatttatacatattcctggagaaacactctttaaaattagtgaggtgtttattcataataagataaatccatcttccagaatggcatacatagaagaagaaaagagaaatttagtcactgctatacagatgtatactcctcctgatggatcatccggtatagtctttgtggcaacagtctcgcagtgtcacgaatataaatcatatttagaaaagagattgtcgtatgatatgtatattattcatggtaaggtcttagatatagacgaaatattagaaaaagtgtattcatcacctaacgtatcgatacttatttctactccttatttggaatctagcgttactatacgcaatgttacacacatttatgatatgggtagagtttttgtcccagctccttttggaggatcgcaacaatttatttctaaatctatgagagatcaacgaaaaggaagagtaggaagagttaatcctggaacgtacgtctatttctatgatctgtcgtatatgaagtctatacagcgaatagattcagaatttctacataattatatattgtacgctaataaatttaatctaacacttcccgaagatttgtttataatccctacaaatttggatattctgtggcgtacaaaggaatatatagactcgttcgatattagtacagaaacatggaataaattattatccaattattatatgaagatgatagagtatgctaaactttatgtactaagtcctattctcgctgaggagttggataactttgagaggacaggagaattaactagtactgtacgagaagccatttcatctctaaatttacgaatcaagattttaaattttaaacgtaaagatgaggatacgtatatacacttttgtagaatattattcggcgtctataatggaacaaacgctactatatattatcatagacctctaacaggatatatgaatatgatttcagatactatatttgttcctgtagataataactaaaatcaaactctaatgaccacatctttttttagagatgaaaaattttccacatctccttttgtagacacgactaaacattttgcagaaaaaagtttattagtgtttagataatcgtatacttcatcagtgtagatagtaaatgtgaacagataaaaggtattcttgctcaatagattggtaaattccatagaatatattaatcctttcttcttgagatcccacatcatctcaaccagagatgttttatccaatgatttacctcgtactataccacatacaaaactagattttgcagttacgtcgtaccttgtattcctaccaaacaaaattttacttttagttcttttagaaaattctaaggtagaatctctatttgtcaatatatcatctatggaattgccactagcaaaaaatgatagaaatatatattgatacatcgcagctggttttgatctactatactttaaaaacgaatcagattccataattgcctgtatatcatccgctgaaaaactatgttttacacgtattccttcggcatttctttttaatgatatatcttgtttagacaatgataaagttataatgtccatgagagacgcgtctccgtatcgtataaatatttcattagatgttagacgcttcattaggggtatacttctataaggtttcttaattagtccatcatttgttgcgtcaagaactactatcggatgttgttgggtatctctagtgttacacatggccttactaaagtttgggtaaataactatgatatctctattaattatagatgtatatatttcattcgtcaaggatattagtatcgacttgctatcgtcattaatacgtgtaatgtaatcatataaatcatgcgataaccaaggaaaattcaaatagatgttcatcatataatcatcgctataattcatattaatactttgacattgactaatttgtaatatagcctcgccacgaagaaagctctcgtattcagtttcatcgataaaggataccgttaaatataactggttaccaatagtctcatagtctattaagtggtaagattcgtacaaatacagaatccctaaaatattatctaatgtgggattaatccttaccataactgtataaaatggagacggagtcataactattttaccgtttgtacttactggaatagatgaaggaataatctccggacatgctggtaaagacccaaatgtctgtttgaagaaatccaatgttccaggtcctaatctcttgacaaaaattacaatattagatccggatatcctttgcatcctatttaccaacatatcacgaactatattaagattatctatcatgtctattctcccaccgttatataaatcgcctccgctaagaaacgttagtatatccatacaatggaatacttcatttctaaaatagtattcgttttctaattctttaatgtgaaatcgtatactagaaagggaaaaattatctttgagttttccgttagaaaagaaccacgaaactaatgttctgattgcgtctgattccgtcgctgaattaatagatttacaccaaaaactcatataacttctagatgtagaagcattcgctaaaaaattagtagaatcaaaggatataagtagatgttccaacaagtgagcaattcccaatatttcatctatatcattctcgaatccgaaattagaaattcccaagtagatatcctttttcatccgatcattgatgaaaatacgaactttattcggtaagacgatcatttactaaggagtaaaataggaagtaatgttcgtatatcgttatcatcgtataaattaaaggtgtggtttttgccattaagagacattataattttaccaatattggaattataatataggtgtatttgagcactcgcgacggttgatgcatcggtaaatatagctgtatctaatgttctagtcggtatttcttcatttcgctgtctaatgatagcgttttctctatctgtttctagtacagctgcctgaagtttattggtcggataatatgtaaaataataagaaatacatacgaataacaaaaataaaataagatataataaagatgccatttagagatctaattttgttcaacttgtccaaattcctacttacagaagatgaggaatcgttggagatagtgtcttccttatgtagaggatttgaaatatcttatgatgacttaataacttactttccagataggaaataccataaatatatttctaaggtatttgaacatgtagatttatcggaggaattaagtatggaattccatgatacaactctgcgagatttagtctatcttagattgtacaagtattccaagtgtatacgaccgtgttataaattaggagataatctaaaaggcatagttgttataaaggacaggaatatatatattagagaagcaaatgatgacttgatagaatatctcctcaaggaatacactcctcagatttatacatattctaatgagcacgttcacatagctgattcaaaattaattctttgcggattttctcaagttacatttatggcgtatacaacgtcgcatataacaacaaataaaaaggtagatgttctcgtttccaaaaaatgtatagatgaactagtcgatccaataaattatcaaatacttcaaaatttatttgataaaggaagcggaacaataaacaaaatactcaggaagatattttattcggtaacaggtggccaaactccataggtcgctttttctatttcagattttagaatttccaaattcaccagcgatttatcagttttggtgaaatccaaggatttattaatgtccacaaatgccatttgttttgtctgtggattgtatttgaaaatggaaacgatgtagttagatagatgtgctgcaaagtttcctattagggttccgcgctttacgtcacccagcatacttgaatcaccatcctttaaaaaaaatgataagatatcaacatggagtatatcatactcggattttaattcttctactgcctcactgacattttcacaaatactacaatacggtttaccgaaaataatcagtacgttcttcatttatgggtatcaaaaacttaaaatcgctactgctggaaaacaaatcactgacgatattggatgataatttatacaacgtatacaatggaatatttgtggatacgatgagtatttatatagccgtcgccaattgtgtaagaaacttagaagagttaactacggtattcataaaatacgtaaacggatgggtaaaaaagggagggcatgtaaccctttttatcgatagaggaagtataaaaattaaacaagacgttagagacaagagacgtaaatattctaaattaacaaaggacagaaaaatgctagaattagaaaagtgtacatccgaaatacaaaatgttaccggatttatggaagaagaaataaaggcagaaatgcaattaaaaatcgataaactcgcatttcaaatatatttatctgattctgataacataaaaatatcattgaatgcgatactaacacatttcaacaataatgagaatgttacattattttattgtgatgaacgagacgcagaattcgttatgtgtatagaggctaaaacacatttctctaccacaggagaatggccgttgataataagtaccgatcaggatactatgctatttgcatctgctgataatcatcctaagatgataaaaaacttaactcaactgtttaaatttgttccctcggcagaggataactatttagcaaaattaacggcgttagtgaatggatgtgatttctttcctggactctatggggcatctataacacccaccaacttaaacaaaatacaattgtttagtgattttacaatcgataatatagtcactagtttggcaattaaaaattattatagaaagactgactctaccgtagacgtgcgtaatattgttacgtttataaatgattacgctaatttagacgatgtatactcgtatatttctccttgccaatgcactgttcaagaatttatattttccgcattagatgaaaaatggaacgattttaaatcatcttatttagagagcgtgccgttaccctgccaattaatgtacgcattagaaccacgtaaggagattgatgtttcagaagttaaaactttatcatcttatatagatttcgaaaatactaaatcagatatcgatgttataaaatctatatcctcgattttcggatattctaacgaaaactgtaacacgatagtgttcggcatctataaggataatttactactgagtataaataattcattttactttaacgatagtctgttaataaccaatactaaaagtgataatataataaatataggttactagattaaaaatggtgttccaattagtgtgttctacgtgcggcaaagatatttctcacgaacgatataaattgattatacgaaaaaaatcattaaaggatgtgctcgtcagtgtaaagaacgaatgttgcaggttaaaattatctacacaaatagaacctcaacgtaacttaacagtgcaacctctattggatataaactaatatggatccggttgattttatcaagacatatgcacctagaggttctattatttttattaattatgccatgtcattaactagtcatttgaatccatcgatagaaaaacatgtgggtatttattatggtacgttattatcggaacacttggtagttgaatcgacctatagaaaaggagttagaatagtcccattggatagtttttttgaaggatatcttagtgcaaaagtatacatgttagagaatattcaagttatgaaaatagcagctgatacgtcattaactttactgggtattccatatggatttggtcatgatagaatgtattgttttaaattggtagctgaatgttataaaaatgcaggtgttgatacatcatctaaacgaatattgggcaaagatatttttctgagccaaaacttcacaaatgataatagatggataaagatatatgattctaataatttaacactttggcaaattgattaccttaaagggtgagttaatatgcataactactcctccgttattttttccctcgttctttttcttaacgttgtttgccatcactctcataatgtaaagatattctaaaatggtaaacttttgcatatcggacgcggaaattggtataaatgatgtaattgtattatttcccgtcaatggactagtcacagctccatcagttttatatcctttagagtatttctcactcgtgtctagaattctagagcattccatgatctgtttatcgttgatattggccggaaagatagattttttattttttattatattactattggcaattgtagatataacttctggtaaatatttttctaccttttcaatctcttctattttcaagccggctatatattctgctatattgttgctagtatcaataccttttctggctaagaagtcatatgtggtattcactatatcagttttaactggtagttccattagcctttccacttctgcagaataatcagaaattggttctttaccagaaaatccagctactataataggctcaccgatgatcattggcaaaatcctatattgtaccagattaatgagagcatatttcatttccaataattctgctagttcttgagacattgatttatttgatgaatctagctggttctctagatactctaccatttctgccgcatacaataacttgttagataaaatcagggttatcaaagtgtttagcgtggctagaatagtgggcttgcacgtattaaagaatgcggtagtatgagtaaaccgttttaacgaattatataatctccagaaatctgtggagttacatacgtgggccgaatgacatcgaagattgtccaatatttttaatagctgctccttgtccattatttctatatttgactcgcaacaattgtagataccattaatcaccgattcctttttcgatgctggacaataacacaattgtttagctttggactctatatattcagaattaatagatatatctctcaatacagattgcactatacattttgaaactatatcaaaaattgtagaacgacgctgttctgcagccatttaactttaaataatttacaaaaatttaaaatgagcatccgtataaaaatcgataaactgcgccaaattgtggcatatttttcagagttcagtgaagaagtgtctataaatgtagactcaactgatgagttaatgtatatttttgccgccttgggcggatctgtaaacatttgggccattatacctctcagtgcatcagtgttctaccgcggagccgaaaacattgtgtttaatcttccggtgtctaaggtaaaatcgtgtttgtgtagttttcacaatgatgccatcatagatatagaacctgatctggaaaataatctagtaaaactttctagttatcatgtagtaagtgtcgattgtaacaaggaactgatgcctattaggacagatactactatttgtctaagtatagatcaaaagaaatcttacgtgtttaattttcacaagtatgaagaaaaatgttgtggtagaaccgtcattcatctagaatggttgttgggctttatcaagtgtattagtcagcatcagcatttggctattatgtttaaagatgacaatattattatgaagactcctggtaatactgatgcattttccagggaatattctatgactgaatgttctcaagaactacaaaagttttctttcaaaatagctatctcgtctctcaacaaactacgaggattcaaaaagagagtcaatgtttttgaaactagaatcgtaatggataatgacgataacattctaggaatgttgttttcggacagagttcaatcctttaagattaacatctttatggcgtttttagactaatactttcaatgagataaatatgggtggtggagtaagtgttgcgctccctaaacgggatccgcctccgggagtacccactgatgagatgttactaaacgtggataaaatgcatgacgtgatagctcccgctaagcttttagaatatgtgcatataggaccgctaacaaaagataaagatgataaagtaaagaaaagatatccagagtttagattagtcagcacaggacccggtaatctttcggcattattaagacaatcgtataatggaaccgcacccaactgctgtcgcacttttaatcgtactcattattggaagaaggatggaaagatatcagataagtatgaagatggtgcagaattagaatcgtgttggcccgacgcccacgacactggaaaatgcgatgttgatttattcgactggtgtcagggggatacattcgatagaaacatatgccatcagtggatcggttcagcctttaataggagtgatagaactgtagatggtcaacaatcgctaataaatctgtataataagatgcaaacattatgtagtaaagatgctagtgtaccaatatgcgaatcatttttgcatcatttacgcgcacataatacagaagatagcaaagagatgatcgattatattttaagacaacagtccactgattttaaacagaaatatatgagatgtagttatcccaccagagataagttagaagagtcattaaaatatgcggaacctcgagaatgttgggatccagagtgttcgaatgccaatgtcaatttcttgctaacacgtaattataataatttaggactatgcaatattgtacgatgtaataccagcgtgaacaacttacagatggataaaacttcctcattaagattatcctgtggattaagcaatagtgatagattttctactgttcccgtcaatagagcaaaagtagttcaacataatattaaacactcgttcgacctaaaattgcatttgatcagtttattatctctcttggtaatatggatactaattgtagctatttaaatgggcgccgcagcaagcatacaaacgacggtgaatacactcagcgaacgtatctcgtctaaattagaacaagaagcgaatgctagtgctcaaacaaaatgtaatatagaaattggaaatttttatatccgacaaaaccatggatgtaacctcactgttaaaaatatgtgctccgcggacgcggatgctcagttggatgccgtgttatcagccgctacagaaacatatagtggattaactccggaacaaaaagcatacgtaccagctatgtttactgccgcgttaaacattcaaacgagtgtaaatactgttgttagagattttgaaaattatgtgaaacagacttgtaattctagtgcggtcgtcgataacaaattaaagatacaaaacgtaatcatagatgaatgttacggagccccaggatctccaacaaatttggaatttattaatacaggatctagcaaaggaaattgtgccattaaggcgttgatgcaattgacgactaaggccactactcaaatagcacctagacaagttgctggcgctggagttcaattttatatgatagttatcggtgttataatattggcagcgttgtttatgtactatgccaagcgtatgctattcacatccacccatgataaaatcaaacttattttagccaataaggaaaacgtccattggactacgtacatggacacattctttagaacttctccgatggttattgctaccacggatatgcaaaactgaaaatatattgataatattttaatagattaatatggaagttatcgctgatcgtctagacgatatagtgaaacaaaatatagcggatgaaaaatttgtagattttgttatacacggtctagagcatcaatgtcctgccatacttcgaccattaattaggttgtttattgatatactattatttgttatagtaatttatatttttacggtacatctagtacgtagaaattatcaaatgttgttggcgttggtggcgcaagtcatcacattaactattttttattactttatactataataatactagactgacttctaacaaacatctcgccggccataaataaatgcttgatattaaagtcttctatttctaacactattccatctgtggaaaataatactctgacattatcgctaattgacacatcggtgagtgatatgcctataaagtaataatcttctttgggcacatataccagtgtaccaggttctaacaacctatttactggtgctcccgtagcatactttttctttaccttaagaatatccaccgtttgcatagtcaatagcgacaagtgattttttatcaaccactcgaaaaagtaattggagtgttcatatcctctacgggctattgtctcatgaccgtgtatgaaatttaagtaacacgactgtggtagatttgttctatagagccggttaccgcaaatagatagaactaccaatacatctgtacaaatattaaacatcaattgattaacagaaaaaacaatgttcgttctgggaatagaaaccagatcaaaacaaaattcgttagaatatatgccacgtttatacatggaatataaaataactacagtttgaaaaataacagtattatttaaacatttaacttgcggggttaatctcacaactttactgtttttgaactgttcaaaatatagcatagatccatgagaaatacgtttagccgcctttaatagaggaaatcccaccgcctttctggatctcaccaacgacgatagttctgaccaacaactcaattctgcatcatccacctgttttaacatataataggctggagatagatatccatcattgcaatattccttctcgtaggcacacaatctaatattgataaaatctccattctcttctctgcatttattatcttgtcttggtttaggccttggtctattattaccatcgttgttgaatctactatttcggtcattaaatctttcatttcggcctggtatatttctatcacctcgtttggttggatttttgtctatattatcgtttgtaacatcggtacgggtattcatttatcacaaaaaaaacttctctaaatgagtctactgctagaaaacctcatcgaagaagataccatattttttgcaggaagtatatccgagtatgatgatttacaaatggttattgctggtgcaaaatccaaatttccaagatctatgctttctatttttaatatagtacctagaacgatgtcaaaatatgagttggtgttgattcataatgagaatatcacaggggcaatgtttaccacaatgtataatataagaaacaatttgggtctaggcgatgataaactaactattgaagccattgaaaattatttcttggatcctaacaatgaggttatgccgcttatcattaataatacggatatgactgccgtcattcctaaaaaaagtggtaggagaaagaataagaacatggttatcttccgtcaaggatcatcgcctatcttgtgtattttcgaaactcgtaaaaagattaatatttataaagaaaatatggaatccgcagctactgagtatacacctatcggagacaacaaggctttgatatctaaatatgcgggaattaatatcctgaatgtgtattctccttccacatccatgagattgaatgccatttacggattcaccaataaaaataaactagagaaacttagtactaataaggaactagaatcgtatagctctagccctcttcaagaacccattaggttaaatgattttctgggactattggaatgtgttaaaaagaatattcctctaacagatattccaacaaaggattgattactataaatggagaatgttcctaatgtatactttaatcctgtgtttatagagcccacgtttaaacattctttattaagtgtttataaacacagattaatagttttatttgaagtattcgttgtattcattctaatatatgtattttttagatctgaattaaatatgttcttcatgcctaaacgaaaaatacccgatcctattgatagattacgacgtgctaatctagcgtgtgaagacgataaattaatgatctatggattaccatggatgacaactcaaacatctgcgttatcaataaatagtaaaccgatagtgtataaagattgtgcaaagcttttgcgatcaataaatggatcacaaccagtatctcttaacgatgttcttcgcagatgatgattcattttttaagtatttggctagtcaagatgatgaatcttcattatctgatatattgcaaatcactcaatatctagactttctgttattattattgatccaatcaaaaaataaattagaagctgttggtcattgttatgaatctctttcagaggaatacagacaattgacaaaattcacagactctcaagattttaaaaaactgtttaacaaggtccctattgttacagatggaagggtcaaacttaataagggatatttgttcgactttgtgattagtttgatgcgattcaaaaaagaatcagctctagctaccaccgcaatagatcctgttagatacatagatcctcgtcgcgatatcgcattttctaacgtgatggatatattaaagtcgaataaagtgaacaataattaattctttattgtcatcatgaacggtggacatattcagttgataatcggccccatgttttcaggtaaaagtacagaattaattagacgagttagacgttatcaaatagctcaatataaatgcgtgactataaaatattctaacgataatagatacggaacgggactatggacacatgataagaataattttgaagcattggaagcaactaaactatgcgatgtcatggacgcagttacagatttctctgtgataggtatcgatgaaggacagttctttccagacattgttgaattctgtgagcgtatggcaaacgaaggaaagatagttatagtagccgcactcgatgggacatttcaacgtaaaccgtttaataatatattggatcttattccattatctgaaatggtggtaaaactaactgctgtgtgtatgaaatgctttaaggaggcttccttttccaaacgattgggtacagaaaccgagatagaaataataggaggtaatgatatgtatcaatcaatgtgtagaaagtgttacatcgactcataatattatatttttatctaaaaaactaaaaataaacattgattaaattttaatataatacttaaaaatggatgttgtgtcgttggataaaccgtttatgtattttgaggaaattgataatgaattagattatgaaccagaaagtgcaaatgaggtcgcaaaaaaactgccgtatcaaggacagttaaaactattactaggagaattattttttcttagtaagttacagcgacacggtatattagatggtgccaccgtagtgtatataggatctgctcccggcacacatatacgttatttgagagatcatttctataatttaggagtgatcatcaaatggatgctaattgacggccgtcatcatgatcctattctaaatggattgcgtgatgtgactctagtgactcggttcgttgatgaggaatatctacgatccatcaaaaaacaactgcatccttctaagattattttaatttctgatgtgagatccaaacgaggaggaaatgaacctagtacggcggatttactaagtaattacgctctacaaaatgtcatgattagtattttaaaccccgtggcgtctagtcttaaatggagatgcccgtttccagatcaatggatcaaggacttttatatcccacacggtaataaaatgttacaaccttttgctccttcatattcagctgaaatgagattattaagtatttataccggtgagaacatgagactgactcgagttaccaaatcggacgctgtaaattatgaaaaaaagatgtactaccttaataagatcgtccgtaacaaagtagttgtcaactttgattatcctaatcaggaatatgactattttcacatgtactttatgctgaggaccgtatactgcaataaaacatttcctactactaaagcaaaggtactatttctacaacaatctatatttcgtttcttaaatattccaacaacatcaactgaaaaagttagtcatgaaccaatacaacgtaaaatatctagcaaagattctatgtctaaaaacagaaatagcaagagatccgtacgcggtaataaatagaaacgtactactgagatatactaccgatatagagtataatgatttagttactttaataaccgttagacataaaattgattctatgaaaactgtgtttcaggtatttaacgaatcatccataaattatactccggtcgatgatgattatggagaaccaatcattataacatcgtatcttcaaaaaggtcataacaagtttcctgtaaattttctatacatagatgtggtaatctctgacttatttcctagctttgttagactagatactacagaaactaatatagttaatagtgtactacaaacaggcgatggtaaaaagactcttcgtcttcccaaaatgttagagacggaaatagttgtcaagattctctatcgtcctaatataccattaaaaattgttagatttttccgcaataacatggtaactggaatagagatagccgatagatctgttatttcagtcgctgattaatcaattaatagagataaaataagaatattataataatattataataatatatcttatatcttgtttagaaaaatgctaatattaaaatagctaacgctagtaatccaatcggaagccatttgatatctataatagggtatctaatttcctgattcagatagcggacagctatattctcggtagctactcgtttggaatcacaaacattatttacatctaatttactatctgtaatggaaacgtttcccaatgaaatggtacaatccgatacattgcatcttgatatatttttttttaaagaggctggtaacaacgcatcgcttcgtttacatggctcgtaccaacaataatagggtaatcttgtatctattcctatccgtatgatgcttttatcaggataaatacatttacatcgtatatcgtctttgttagcatcgcagaatgcataaatttgttcgtccgtcatgataaaaatttaaagtgtaaatataactattatttttatagttgtaataaaaagggaaatttgattgtataccttcggttctttaaaagaaactgacttgataaaatggctgtaatctctaaggttacgtatagtctatatgatcaaaaagagattaatgctacagatattatcattagtcatgttaaaaatgacgatgatatcggcactgtcaaagatggtagactaggggctatggatggggcattatgtaagacttgtgggaaaacggaattggaatgttttggacactggggtaaagtaagtatttataaaactcatatagttaagcctgaatttatttcagaaattattcgtttactgaatcatatatgtattcactgcggattattgcgttcacgagaaccgtattccgacgatattaacttaaaagagttatcaggacacgctcttaggagattaaaggataaaatagtatccaagaaaaagtcatgttggaacagcgaatgtatgcaaccgtatcaaaaaattacattttcaaagaaaaaggtttgttttgtcaacaagttggatgatattaatgttcctaattctctcatctatcaaaagttaatttctattcatgaaaagttttggccattattagaaattcatcaatatccagctaacttattttatacagactactttcccatccctccgctgattattagaccggctattagtttttggatagatagtatacccaaagagactaatgaattaacttacttattaggtatgatcgttaagaattgtaacttgaacgctgatgaacaggttatccagaaggcggtaatagaatacgatgatattaaaattatttctaataacactaccagtatcaatttatcatatatcacatccggtaaaaataatatgattagaagttatatcgtcgcccgacgaaaagatcagacggctagatctgtaattggtcccagtacatctatcaccattaatgaggtaggaatgcctgcatatattagaaatacacttacagaaaagatatttgttaatgcctttacagtggataaagttaaacaactattagcatcaaaccaagttaaattttactttaataaacgattaaaccaattaactagaatacgccaaggaaagtttatcaaaaataaaatacatttattgcctggtgattgggtagaagtagctgttcaagaatatacaagtattatttttggaagacagccgtctctacatagatataatgtcattgcttcttctatcagagatacagaaggcgatactatcaaaatatctcccggaattgctaactctcaaaatgctgatttcgacggagatgaagaatggatgatattggagcaaaatcctaaagctgtagttgaacaaagtattcttatgtatccgacgacgttactcaaacacgatattcacggagcccccgtttatggatctattcaagatgaaatcgtggcagcgtattcattgtttaggatacaagatctttgtttagatgaagtattgaacatcttggggaaatatggaagagagttcgatcctaaaggtaaatgtaaattcagcggtaaagatatctatacttacttgataggtgaaaagattaattatccggatctcttaaaggatggtgaaattattgcaaacgacgtagatagtaattttgttgtggctatgaggcatctgtcattggctggactcttatccgatcataagtcgaacgtggaagggatcaactttattattaagtcatcttatgtttttaagagatatctatctatttacggttttggggtgacattcaaagatctgagaccaaattcgacgttcactaataaattggaggccatcaacatagaaaaaatagaacttatcaaagaagcatacgccaaatatctcaaagatgtaagagatgggaaaatagttccattatctaaagctttagaggcggactacgtggaatccatgttatccaacttgacaaatcttaatatcagagagatagaagaacatatgagacaaacgctaatagatgatccagataataatctcctgaaaatggccaaggcgggttataaagtaaatcccacagaactaatgtatattctaggtacttatggacaacagaggatagatggcgaaccagcagagactcgagtattgggtagagtcttaccttactatcttccagactctaaggatccagaaggaagaggttatattcttaattctttaacaaaaggattaacgggttctcaatattacttttcaatgctggttgcaagatctcaatctactgatatcgtctgtgaaacatcacgtacaggaacactagctagaaaaatcattaaaaagatggaggatatggtggtcgatggatacggacaagtagttataggtaatacactcatcaagtacgccgccaattataccaaaattctaggctcggtatgtaaacctgtagatcttatctatccagatgagtccatgacttggtatttggaaatcagtgccttgtggaataaaataaaacagggattcgtttactctcagaaacaaaaacttgcaaagaagacattggcgccgtttaatttcctagtatttgtcaaacccaccactgaggataatgccattaaggttaaggatctgtacgatatgatccacaacgtcatcgatgatgtgagagagaagtacttctttaccgtatctaatatagattttatggagtatatctttttgactcatctgaatccttctagaattagaattacaaaggaaacggctattaccatctttgaaaagttctatgaaaaactcaattatactctaggtggcggaactcctattggaattatttctgcacaggtattgtctgagaagtttacacaacaagccctgtccagttttcacactactgaaaagagtggtgccgtcaaacaaaaacttggtttcaacgagtttaataacttgactaatttgagtaaaaataagaccgaaattatcactctggtatccgatgatatctctaaacttcaatctgttaagattaatttcgaatttgtatgtttgggagaattaaatccagacatcactcttcgaaaagaaacagatagatatgtagtagacataatagtcaatagattatacatcaagagagcagaaattaccgaattagtcgtcgaatatatgattgaacgattcatctcctttagcgtcattgtaaaggaatggggtatggagacattcatcgaggacgaggataatatcagatttactgtctatctaaatttcgttgaaccagaggaattgaatcttagtaagtttatgatggttcttccgggtgctgccaacaagggcaaaattagtaaattcaagattcctatctctgattatacaggttatgacgacttcaatcaaccaaaaaagctcaataagatgactgtagaacttatgaatctaaaagaattggtttcatttgatttggaaaacgttaacgtgtatcctggagtatggaatacatacgatatcttcggcatcgaggccgctcgtggatacttgtgcgaagccatgttaaacacctatggagaaggtttcgattatctgtatcagccttgtgatcttctcgctagtttactatgtgctagttacgaaccagaatcagttaataaattcaagttcggcgcagctagtactcttaagagagctactttcggagacaataaagcattgttaaacgcggctcttcataaaaagtcagaacctattaacgataatagtagctgccacttttttagcaaggtcccaaatataggaactggatattacaaatactttatcgacttgggtcttctcctgagaatggaaaggaaactatctgataagatatcttctcaaaagatcaaggagatggaagaaacagaagacttttaattcttatcaatcacatatttttctatgatctgtcttttaaacgatggattttccacaaatgcacctcttaagtccctcatagaatgatacacgtataaaaaatatagcataggcgacgactccttatttttagacattagatatgccaaaatcatagccccgcttctatttactcccgcagcacaatgaaccaacacaggctcgttttgttgatcacatttagataaaaaggcggtcacgtcgtcaaaatatttactaatgtcggtagttgtatcatctaccaacggtatatgaataatattaatattagagttaggtaatgtatatttatccatcgtcaaatttaaaacatatttgaacttaacttcagatgatggtgcatccatagcatttttataatttcccaaatatacattattggttactcttgtcattatagtgggagatttggctctgtgcatatctccagttgaacgtagtagtaagtatttatacaaacttttcttatccatttataacgtacaaatggataaaactactttatcagtaaacgcgtgtaatttagaatacgttagagaaaaggctatagtaggcgtacaagcagccaagacatcaacacttatattctttgttattatattggcaattagtgcgctattactctggtttcagacgtctgataatccagtctttaatgaattaacaagatatatgcgaattaaaaatacggttaacgattggaaatcattaacggatagcaaaacaaaattagaaagtgatagaggtagacttctagccgctggtaatgatgatatattcgaattcaaatgtgtggatttcggcgcctattttatagctatgcgattggataagaaaacatatctgccgcaagctattaggcgaggtactggagacgcgtggatggttaaaaaggcggcaaaggtcgatccatctgctcaacaattttgtcagtatttgataaaacacaagtctaataatgttattacttgtggtaatgagatgttaaacgaattaggttatagcggttattttatgtcgccgcattggtgttccgatcttagtaatatggaatagtgttagataaatgcggtaacaaatgttcctgtaaggaaccataacagcttagatttaacgttaaagatgagcataaacataataaacaaaattacaatcaaacctataacattaatatcaaacaatccaaaaaatgaaatcagtggagtagtaaacgcgtacataactcctggataacgtttagcagctgccgttcctattctagaccaaaaattcggtttcatgttttcgaaacggtattctgcaacaagtcgaggatcgtgttctacatatttggcggcgttatccagtatctgcctattgatcttcatttcgttttcgattctagccagttcaaaataaaatcccgatgatagacctccagactttataatttcatctacgacgttcagtgccgtagtaactctaataatataggctgataagctaacatcataccctcctgtatatgtgaatatggcatgatctttgtccattactagctcggttttaactttatttcctgtaataatttctctcatctgtaggatatctattttcttgtcatgcattgccttcaagacgggacgaagaaacgtaatatcctcaataacgttatcgttttctacaacaactacatactctacctttttattttctagctcggtaaaaaatttagaatcccatagggctaaatgtctagcgatatttcttttcgtttcttctgtacacatagtgttacaaaaccctgaaaagaagtgagtatacttgtcatcatttctaatgtttcctccagtccactgtataaacacataatccttgtaatgatctggatcatccttgactaccacaacatctcttttttctggtataacttcattgtccttcacatcatcgaacttctgatcattaatatgctcatgaacattaggaaatgtttctgatggaggtctagcaataactggcacaacaataataggagttttcgccgccgccatttagttattgaaattaatcatatacaactctctaatacgagttatattttcgtctatccattgtttcacattgacatattttgacaaaaagatataaaatgcgtattctaatgcttctctgtttaacgaattactaaaatatacaaatacgtcgctgtctggcaataaatgatatcttagaatattgtaacaatttattttgtattgtacatgttcatgatctatgagttcttcttcgaatggcatcggatctccaaatctgaaaacgtataaataggagttagaataataatatttgagagtattggtaatgtacaaactctttagcggtataattagtttttttctctcgatttctatttttagatgtgatggaaaaatggccaattttgtagcattagtatcatgaactctaatcaaaatcttaatatcttcgtcacacgttagctctttgaagtttttaagagatgcatcagttggttctacagatggagtaggtgcaacaattttttgttcgacacatgtatgtactggagccattgtcttaactataatggtgcttgtatcgaaaaactttaatgcagataacggaagctcttcgccgcgactttctacgtcgtagttgggttctaacgccgatctctgaatggatactagttttctaagttctaatgtgattctctgaaaatgtaaatccaattcctccggcattatagatgtgtatacatcggtaaataaaactatagtatccaacgatcccttctcgcaaattctagtcttaaccaagaaatcgtatataactacggagatggcgtatttaagagtggattcttctaccgttttgttcttggatttcatataagaaactataaagtccgcactactgttaagaatgattactaacgcaactatatagtttaaattaagcatcttggaaacataaaataactctgtagacgatatttgactttcgaataagtttgcagacaaacgaagaaagaacagacctctcttaatttcagaagaaaactttttttcgtattcctgacgtctagagtttatatcaataagaaagttaagaattagtcgattaatgttgtatttcattacccaagtttgagatttcataatattatcaaaagacatgataatattaaagataaagcgctgactatgaacaaaatagctatatggttcgctcaagaatatagtcttgttaaacgtggaaacgataactgtatttttaatcacgtccgcggcatctagattaaatataggtatatttatcccacacactctacaatatgccacaccatcttcataataaataaattcgttagcaaaattattaattttagtgaaatagttagtgtcaactttcatagcttccttcaatctaatttgatgctcacacggcgcgaattctactctaacatccattttccatgcctcaggttcatcgatctctataatatctagtttcttgcgtttcacaaacacaggctcgtctctcgcgatgagatctgtatagtaactatgtaaatgataactagatagaaagatgtagctatatagatgacgatcctttaagagaggtatgatgactttaccccaatcagatagactgttgttatggtcttcggaaaaagaatttttataaatttttccagtattttccaaatatacgtacttgacatctaaaaaatccttaatgataataggaatggataatccgtctattttataaagaaatacatatcgcacattatacttttttttggaaatgggaataccgatgtgtctacataaatacgcaaagtctaaatattttttagagaatcttagttggtccaaattcttttccaagtacggtaatagatttttcatattgaacggtatcttcttgatctctggttctaattccgcattaaatgatgaaactaagtcactatttttataactaacgattacatcacctctatcatcatttaccaggatactgatcttcttttgtcgtaaatacatgtctaatgtgttaaaaaaaagatcatacaagttatacatcatttcatctgtagtattcttgtcattgaaggataaactcgtactaatctcttctttaacagtctgttcaaatttatatcctatatacgaaaaaatagcaaccagtgtttgatcatccgcgtcaatattctgtactatcgtagtgtataacaatcttatatcttcttctgtgatagtcgatacgttataaaggttgataacgaaaatatttttatttcgtgaaataaagtcatcgtaggattttggacttatattcgcgtctagtagatatgcttttatttttggaatgatctcaattagaatagtctctttagagtccatttaaagttacaaacaactaggaaattggtttatgatgtataatttttttagtttttatagattctttattctatacttaaaaaatgaaaataaatacaaaggttcttgagggttgtgttaaattgaaagcgagaaataatcataaattatttcattatcgcgatatccgttaagtttgtatcataatggcgtggtcaattacgaataaagcggatactagtagtttcacaaagatggctgaaatcagagctcatctaagaaatagcgctgaaaataaagataaaaacgaggatattttcccggaagatgtaataattccatctactaagcccaaaacaaaacgaaccattacgcctcgtaaaccagcggctactaaaagatcaaccaaaaaggataaagaaaaggaggaagtggaagaagaagtagttatagaggaatatcgtcaaacaactgaagaaaattctccacctccgtcatcatctcctagagtcggcgacattgtagaaagcgtggccgctgtagagctcgatgatagcgacgggggtgatgatgaacctatggtacaagttgaagctggtaaagtaaatcatagtgctagaagcgatctctctgacctaaaggtggctaccgacaatatcgttaaagatcttaagaaaattattactagaatctctgcagtatcgactgttctagaggatgttcaagcagctggtatctctagacaatttacttctatgactaaagctattacaacactatctgatctagtcaccgagggaaaatctaaagttgttcgtaaaaaagttaaaacttgtaagaagtaaatgcgtccacttttttataaagatggtaaactgtttaccgataataattttttaaatcctgtatcagactataatccagcgtatgaggttttgcaacatgttaaaattcctactcatttaacagatgtagtagtatatgaacaaacgtgggaagaggcgttaactagattaatttttgtgggaagtgattcaaaaggacgtagacaatacttttacggaaaaatgcatgtacagaatcgcaacgctaaaagagatcgtatttttgttagagtatataatgttatgaaacgaattaattgttttataaacaaaaatataaagaaatcgtccacagattccaattatcagttggcggtttttatgttaatggaaactatgttttttattagatttggtaaaatgaaatatcttaaggagaatgaaacagtagggttattaacactaaaaaataaacacatagaaataagtcccgatgaaatagttatcaagtttgtaggaaaggacaaagtttcacatgaatttgttgttcataagtctaatagactatataaaccgctattgaaactgacggatgattctagtcccgaagaatttctgttcaacaaactaagtgaacgaaaggtatacgaatgtatcaaacagtttggtattagaatcaaggatctccgaacgtatggagtcaattatacgtttttatataatttttggacaaatgtaaagtccatatctcctcttccgtcaccaaaaaagttaatagcattaactatcaaacaaactgctgaagtggtaggtcatactccatcaatttcaaaaagagcttatatggcaacaactattttagaaatggtaaaggataaaaattttttagacgtggtatctaaaactacgttcgatgaattcctatctatagtcgtagatcacgttaaatcatctacggatggatgatatagatctttacacaaataattacaagaccgataaatggaaatggataagcgtatgaaatctctcgcaatgacagctttcttcggagagctaaacacattagatattatggcattgataatgtctatatttaaacgccatccaaacaataccattttttcagtggatacggatggtcagtttatgattgatttcgaatacgataattataaggcttctctatatttggatctgacccttattccgatatctggagatgaatgcaagactcacgcatcgagtatagccgaacaattggcgtgtgtggatattattaaagaggatattagtgaatatatcaaaactactccccgtcttaaacgttttataaaaaaataccgcaatagatcagacactcgtatcagtcgagatacagaaaagcttaaaatagctctagctaaaggcatagattacgaatatataaaagacacttgttaataagtaaatgaaaaaaaactagtcgtttatgataaaacacgatggatgctaatatagtatcatcttctactattgcgacgtatatagacgcgttagcaaagaatgcttcagaattagaacagaggtctaccgcatacgaaataaataatgaattggaactagtatttattaagccgccattgattactttgacaaatgtagtaaatatctccacgattcaggaatcgtttattcgatttaccgttactaataaggaaggtgtcaaaattagaactaagattccattatctaaggtacatgggctagatgtaaaaaatgtacagttagtagatgctatagataacatagtttgggaaaagaaatcattagtgacggaaaatcgtcttcacaaagaatgcttgttgagactatcgacagaggaacgtcatatatttttggattacaagaaatatggatcctctatccgattagaattagtcaatcttattcaagcaaaaacaaaaaactttacgatagactttaagctaaaatattttctaggatccggtgcccaatctaaaagttctttgttgcacgctattaatcatccaaagtcgaggcctaatacatctctggaaatagaatttacacctagagacaatgaaacagttccatatgatgaactaataaaggaattgacgactctctcgcgtcatatatttatggcttctccagagaatgtaattctttctccgcctattaacgcacctataaagacttttatgttgcctaaacaagatatagtaggtctggatctggaaaatctatatgccgtaactaagactgacggcattcctataactatcagagttacatcaaaagggttgtattgttattttacacatcttggttatattattagatatccagttaagagaataatagattccgacgtagtagtctttggtgaggcagttaaggataagaactggaccgtatatctcattaagctaatagagccaaatgcaatcggtgatagactagaagaaagtaagtatgtcgaatctaaactagtggatatttgtgatcggatagtattcaagtcaaagaaatatgaaggtccgtttactacaactagtgaagtcgtcgatatgttatctacatatttaccaaagcaaccagaaggtgttattctgttctattcaaagggacctaaatctaacattgattttaaaatcaaaaaggagaatactatagaccaaactacaaatgtagtatttaggtacatgtccagtgaaccaattatctttggagagtcgtctatctttatagagtataagaaatttaccaacgataaaggctttcctaaagaatatggttctggtaagattgtgttatacaacggcgttaattatctaaataatatctattgtttggaatatattaatacacataatgaagtgggtattaagtccgtggttgtacctattaagtttatagcagaattcttagtcaatggagaaatacttaaacctagaatcgataaaaccatgaaatatattaactcagaagactattatggaaatcaacataatatcatagtcgaacatttaagagatcaaagcatcaaaataggagatgtctttaacgaggataaactatcggatgtgggacatcaatacgccaataatgataaatttagattaaatccagaagttagttattttacgaataaacgaactagaggaccgttgggaattttatcaaactacgtcaagactcttcttatttctatgtattgttccaaaacatttttagacgattccaacaaacgaaaggtattggcgattgattttggaaacggtgctgacctggaaaaatacttttatggagagattgcgttattggtagcgacggatccggatgctgatgctatagctagaggaaatgaaagatacaacaaattaaattctggaattaaaaccaagtactacaaatttgactacattcaggaaactattcgatccgatacatttgtctctagtgtcagagaagtattctattttggaaagtttaatatcattgactggcagttcgctattcattattcgtttcatccgagacattatgctacagtcatgaataacttatccgaactaactgcttctgggggcaaggtattgattactaccatggatggagacaaattatcaaaattaaccgataaaaagacttttataattcataagaatctacctagtagcgaaaactatatgtctgtagaaaaaatagctgatgatagaatattggtatataatccatcaacaatgtctacaccaatgactgaatacattatcaaaaagaatgatatagtcagagtgtttaacgaatacggatttgttcttgtagacaacattgatttcgctacaattattgaacgaagtaaaaagtttattaatggcgcatctacaatggaagatagaccgtctacaagaaactttttcgaactaaatagaggagccattaaatgtgaaggtttagatgtcgaagacttacttagttactatgttgtttatgtcttttctaagcggtaaataataatatggtatgggttctgatatccccgttctaaatgcattaaataattccaatagagcgatttttgttcctataggaccttccaactgtggatactctgtattgttaatagatatattaatacttttgtcgggtaacagaggttctacgtcttctaaaaataaaagtttgataacatctgacctgttcataaataaaaacttggcaattctatatatactcttattatcaaatctagccgctgtcttatagatgtgagctactgtaggtgtaccatttgattttctttctaatactatatatttctctcgaagaagttcttgcacatcatctgggaataaaatactactgttgagtaaatcagttattttttttatatcgatattgatggacatttttatagttaaggataataagtatcccaaagtcgataacgacgataacgaagtatttatacttttaggaaatcacaatgactttattagatcaaaattaacaaaattaaaggagcatgtatttttttctgaatatattgtgactccagataaatatggatctttatgcgtcgaattaaatggatctagttttcagcacggtggtagatatatagaggtggaggaatttatagatgctggaagacaagttagatggtgttctacatccaatcatatatctgaagatatacccgaagatatacacactgataaatttgtcatttatgatatttatacgtttgattcgttcaagaataaacgattggtatttgtacaggtacctccatcattaggagatgatagctatttgactaatccgttcttgtctccgtattatcgtaattcagtagcccggcaaatggtcaataatatgatttttaatcaagattcatttttaaaatatttattagaacatctgattagaagccactatagagtttctaaacatataacaatagttagatacaaggataccgaagaattaaatctaacaagaatatgttataatagagataagtttaaggcgtttgtattcgcttggtttaacggcgtttcggaaaatgaaaaggtactagatacgtataaaaaggtatctgatttgatataatgaactcggtaactgtgtcgcacgcaccatatactattacttatcacgatgattgggaacccgtaatgaatcaattagtagagttttataacgaagtatccagctggctgctacgagatgagacgtcgcctattcctgataagttctttatacagttgaaacaaccgcttagaaataagcgagtatgtgtgtgtggtatagatccgtacccgaaagatggaactggtgtaccgttcgaatcaccaaattttacaaaaaaatcaattaaggagatagcttcatccatatctagattaacaggagtaattgattataaaggttataaccttaatataatagacggggttataccctggaattattacttaagttgtaaattaggagaaacaaaaagtcacgcgatttactgggataagatttctaagttactgctgcagcatataactaaacacgttagtgttctttattgtttgggtaaaacagatttctcgaatatacgggcaaagttagaatccccggtaactaccatagtgggatatcatccagcggctagagaccaccaattcgagaaagatcgatcatttgaaattatcaacgttttactggaattagataacaaggcacctataaattgggctcaagggtttatttattaatgctttagtgaaattttaacttgtgttctaaatggatgcggatattagaggtaatgatattatctttgttcttaagactataggtgtcccatcggcatgtagacaaaatgaagatccgagattcgtagaagcatttaaatgcgacgagttagaaagatatattgagaataatccagaatgtacactattcgaaagtcttagggatgaggaagcatactctatagtcagaattttcatggatgtagatttagacgcatgtctagacgaaatagattatttaacggctatacaagattttattatcgaggtgtcaaactgtgtagctagattcgcgtttacagaatgcggtgccattcatgaaaatgtaataaaatccatgagatctaatttttcattaactaagtctacaaatagagataaaacaagctttcatatcatctttttagatacgtataccactatggatacattgatagctatgaaacgaacacttttagaattgagtagatcatctgaaaatccactaaccagatcgatagacactgccgtatataggagaaaaacaactcttcgggttgtaggtactaggaaaaatccaaattgtgacactattcatgtaatgcaaccaccgcatgataatatagaagattacctattcacttacgtggatatgaacagcaatagttattacttttctctacaacgacgattggaggatttagtttcagataagttatgggaaccatggtttatttcattcgaagacgctataaaaagagtttcaaaaatattagttaattctataataaactttaacgatcttgatgaaaataattttactacggtaccactagtcatagattacgtaacaccttgtgcattatgtaaaaaacgatcgcataaacatccgcatcaactatcgttggaaaatggtgctattagaatttacaaaactggtaatccgcatagttgtaaagttaaaattgttccattggatggcaacaaactgtttaatatcgcacaaagaattttagacactaactctgttttattaaccgaacgaggagatcatatagtttggattaataattcatggaaatttaatagcgaagaaccgttgataacaaaactaattctgtcaataagacatcaactacctaaggaatattcaagcgaattactctgcccgaggaaacgaaagactgtagaagctaacatacgagacatgttagtagattcagtagagaccgatacctatccggataaacttccgtttaaaaatggtgtattggacctggtagacggaatgttttactctggagatgatgctaaaaaatatacatgtactgtatcaaccggatttaaatttgacgatacaaagttcgtcgaagacagtcctgaaatggaagagttaatgaatatcattaacgatatccaaccattaacggatgaaaataagaaaaatagagagttgtacgaaaaaactttatctagttgtttatgcggtgctaccaaaggatgtttaacattcttttttggagaaactgcaactggaaagtcgacaaccaaacgtttgttaaagtctgctatcggtgacctgtttgttgagacgggtcaaacaattttaacagatgtattggataaaggacctaatccatttatcgctaacatgcacttgaaaagatctgtattctgtagcgaactacctgattttgcatgtagtggatcaaagaaaattagatctgacaatattaaaaagttgacagaaccttgtgtcattggaagaccgtgtttctccaataaaattaataatagaaaccatgcgacaataattattgataccaattacaaacctgtatttgataggatagataacgcattaatgagaagaattgccgtcgtgcgattcagaacacacttttctcagccttctggtagagaggctgctgaaaataatgacgcgtacgataaagtcaaactattagacgagggattagatggtaaaatacagaataatagatatagattcgcatttctatacttgttggttaaatggtacaaaaaatatcatattcctattatgaaactatatcctacaccggaagaaattccggactttgcattctatctcaaaataggtactctgttggtctctagctctgtaaagcatattccattaatgacggacctctccaaaaaggggtatatattgtacgataatgtggtcactcttccgttgactactttccaacagaaaatatccaagtattttaattctagactatttggacacgatatagagagcttcatcaatagacataagaaatttgccaatgttagcgatgaatatctgcaatatatattcatagaggatatttcatctccgtaaatatatactcgtatatttatagaagatatcacatatctaaatgaataccggaatcatagatttatttgataatcatgttgatagtataccgactatattacctcatcagttagctactttagattatctagttagaactatcatagatgagaacagaagcgtgttattgttccatattatgggatcgggtaaaacaataatcgctttgttgttcgccttggtagcttccagatttaaaaaggtttacattctagtgccgaacatcaacatcttaaaaattttcaattataatatgggtgtagctatgaacttgtttaatgacgaattcatagctgagaatatctttattcattccacaacaagtttttattctcttaattataacgataacgtcattaattataacggattatctcgctacaataactctatttttatcgttgatgaggcacacaatatctttgggaataatactggagaacttatgaccgtgataaaaaataaaaacaagattccttttctactattgtctggatctcccattactaacacacctaatactctgggtcatattatagatttaatgtccgaagagacgatagattttggtgagattattagtcgtggtaagaaagtaattcagacacttcttaacgaacgcggcgtgaatgtgctcaaggatttgcttaaaggaagaatatcatattacgaaatgccggataacgatctaccaacgataagatatcacggacgtaagtttctagatactagagtagtatattgtcacatgtctaaacttcaagagagagattatatgattactagacgacagctatgttatcatgaaatgtttgataaaaatatgtataacgtgtcaatggcagtattgggacaacttaatctgatgaataatttagatacgttatttcaggaacaggataaggaattgtacccaaatctgaaaataaataatggcgtgttatacggagaagaattggtaacgttaaacattagttccaaatttaagtactttatcaatcggatacagacactcaacggaaaacattttatatacttttctaattctacatatggcggattggtaattaaatatatcatgctcagtaatggatattctgaatataatggttctcagggaactaatccacatatgataaacggcaaaccaaaaacatttgctatcgttactagtaaaatgaaatcgtctttagaggatctattagatgtgtataattctcctgaaaacgatgatggtagtcaattgatgtttttattttcgtcaaacattatgtccgaatcctatactctgaaagaggtaaggcatatttggtttatgactatcccagatactttttctcaatacaaccaaattcttggacgatctattagaaaattctcttacgccgatatttctgaaccagttaatgtatatcttttagccgccgtatattccgatttcaatgacgaagtgacgtcattaaacgattacacacaggatgaattgattaatgttttaccatttgacatcaaaaagctgttgtatctaaaatttaagacgaaagaaacgaatagaatatactctattcttcaagagatgtctgaaatgtattctcttccaccacatccatcaattgtaaaagttttattgggagaattgatcagacaatttttttataataattctcgtattaagtataacgactccaagttacttaaaatggttacatcagttataaaaaataaagaagacgctaggaattacatagatgatattgtaaacggtcacttctttgtatcgaataaagtatttgataaatctcttttatacaaatacgaaaacgatattattacagtaccgtttagactttcctacgaaccatttgtttggggagttaactttcgtaaagaatataacgtggtatcttctccataaaactgatgagatatataaagaaataaatgtcgagctttgttaccaatggataccttccagttacattggaaccacatgagctaacgttagacataaaaactaatattaggaatgccgtatataagacgtatctccatagagaaattagtggtaaaatggccaagaaaatagaaattcgtgaagacgtggaattacctctcggtgaaatagttaataattctgtagttataaacgttccgtgtgtaataacctacgcgtattatcacgttggggatatagtcagaggaacattaaacatcgaagatgaatcaaatgtaactattcaatgtggagatttaatctgtaaactaagtagagattcgggtactgtatcatttagcgattcaaagtactgcttttttcgaaatggtaatgcgtatgataacggcagcgaagtctccgccgttctaatggaggctcaacaaggtatcgaatctagttttgtttttctcgcgaatatcgtcgactcataagaaagagaatagcggtaagtataaacacgaatactatggcaataattgcgaatgttttattcccttcgatatatttttgataatatgaaaaacatgcctctctcaaatcagacaaccatttcataaaatagttctctcgcactggcgaagtggttacagctcgtataatctccccagaataatatatttctgtgtcgtcattcaatttatacggatttctatagttctctgttatataatgcggttttccctcatgattagacgacgacaatagtgttctaaatttagatagttgatcagaatgaatgtttattggcgttggaaaaattatccatgccgcgtctgcagagtggttgatagttgttcctagatatgtaaaataatccaacgtgctaggcaacaaattgtctagataaaatactgaatcaaacggcgtagacgtattagcgtatctaatggaatccaattgattgactatcttttgaaaatatacatttttatgatccgatacttgtaagaatatagcaacaatgataattccatcatcgtgtttttttgcctcttcataagaactatattttttcttattccaatgaacaagattaatctctccagagtatttgtatacatctatcaagtgattggatccataatcgtcttcctttccccaatatatatgtagtgatgataacacatattcattggggagaaaccctccacttatgtacccgcctttaaaattaatccttactagttttccagtattctgaatagtggttggttttgactcattataatgtatgtctaacggcttcaatcgcacgttagaaatcgcttttttagtttctatattaataggagatagttgttgaggcatagtaaaaatgaaatgataactgtttagaaatagctcttagtatgggaattacaatggatgaggaagtgatatttgaaactcctagagaattaatatctattaaacgaataaaagatattccaagatcaaaagacacgcacgtgtttgctgcgtgtataacaagtgacggatatccgttaataggagctagaagaacttcattcgccttccaggcgatattatctcaacaaaattcagattctatctttagagtatccactaaactattacggtttatgtactacaatgaactaagagaaatctttagacggttgagaaaaggttctatcaacaatatcgatcctcacttcgaagagttaatattattgggtggtaaactagataaaaaggaatctattaaagattgtttaaaaagagaattaaaagaggaaagtgatgaacgtataacggtaaaagaattcggaaatgtaattctaaaacttacgacacgtgataaattatttaataaagtgtatataggttattgtatggcatgttttattaatcaatcgttggaggatttatcgcatactagtatttacaatgtagaaattagaaagattaaatccttaaatgattgtattaacgatgataaatacgaatatctgtcttatatttataatatgctagttaatagtaaatgaccttttacagatctagtataattagtcagattattaagtataatagacgactagctaagtctattatttgcgaagatgactctcaaattattacacttacggcattcgttaaccaatgcctatggtgtcataaacgagtatccgtatccgctattttattgactaatgataacaaaatattagtgtgtaacagacgagatagttttctctattctgaaataattagaactagaaacatgtttagaaaaaaacgattatttctgaattattctaattatttgaacaaacaggaaagaagtatactatcgtcatttttttctctagatccagctactactgataatgatagaatagacgctatttatccgggtggtatacccaaaaggggcgagaacgttctagagtgtttatccagggaaatcaaagaagaagttaatatagacaattcttttgtattcatagacactcgtttttttattcatggtatcatagaagataccattattaacaaattttttgaggtaattttctttgtcggaagaatatctctaacgagtgatcaaattattgatacctttaaaagtaatcatgaaatcaaggatctgatatttttagatccgaattcgggtaatggactacaatatgaaattgcaaaatatgctctagatactgcaaaacttaaatgttacggccatagaggatgttattacgaatcattaaaaaaattaacggatggatttattgattagaaaatataaattaatttaccatcgtgtatttttataacaggattgtccggcatatcatgtagatagttaccgtctacatcgtatactcgaccatctacgcctttaaatcctctatttattgacattaatctactagaattggaataccaaatattagtaccctcaattagtttattggtaatattttttttagacgatagatcgattgctcttgaaaccaatgttttccaaccggactcattgttgatcggtgagaagtctttttcattagcatgaatccattccaatgatgtatgtttaaacactctaaacaattgaacaaattcttttgatttgctttgaatgatttcaaataggtcttcgtctacagtaggcatactattagataatctagccattataaagtgcacgtttacatatctacgttctggaggagtaagaacgtgactattgagacgaatggctcttcctactatctgacgaagagacgcctcgttccatgtcatatctagaataaagatatcattgattgagaagaaactaataccctcacctccactagaagagaatacacatgttttaatgcattctccgttagtgtttgattcttggttaaactcagccaccgccttgattctagtatctttcgttctagatgagaactctatattagagataccgaatactttgaaatatagtaataagatttctattcctgactgattaacaaatggttcaaagactagacatttaccatgtgatgctaatattcccaaacatacatctatgaatttgacgcttttctcttttaattcagtaaatagagagatatccgccgcactagcatcccctcccaatagttctccccttttaaaggtatctaatgcggatttagaaaattctctatctcttaatgaatttttaaaatcattatatagggttgctatctcttgcgcgtattcgccgggatcacgattttgtctttcaggaaagctatcgaacgtaaatgtggtagccatacgtctcagaattctaaatgatgatataccagtttttatttctacgagtttagccttttgataaatctcttcttgcttttttgacatattaacgtatcgcattaatactgttttcttagcgaatgatgcagacccttctacatcatcaaaaatagaaaactcgttattaactatatacgaacatagtcctcctagtttggatactaattctttttcatcgactagacgtttgttctcaaatagcgattggtgttgtaaggatcctggtcgcagtaagttaaccaacatggtaaattcttgcacactattgacgacaggtgtagccgataaacaaatcatcttatggttttttaacgcgatggtcttagataaaaaattatatactgaacgagtaggacggatcttaccatcttctttgattaatgatttagaaatgaagttatgacattcatcaatgatgacgcatattctactcttggaattaatagttttgatattagtaaaaaatttatttctaaaattttgatcatcgtaattaataaaaatacaatccttcgttatctctggagcgtatctgagtatagtgttcatccaaggatcttctatcaaagcttttttcaccaataagataatagcccaattcgtataaatatccttaagatgtttgagaatatatacagtagtcattgttttaccgacacctgtttcatggaacaataaaagagaatgcatactgtctaatcctaagaaaactcttgctacaaaatgttgataatctttgaggcgtactatgtctgaccccatcatttcaacgggcatattagtagttctacgtaaggcataatcgatataggccgcgtgtgatttactcatttatgagtgataagtaataactatgttttaaaatcacagcagtagtttaactagtcttctctgatgtttgttttcgatactttttgaatcagaagtcatactagaataaagcagcgagtgaacgtaatagagagcttcgtacactctattcgaaaactctaaaaacttattaatgaattccgtatccactggatcgtttaaaatactaaattgaacactgttcacatccttccaagaagaagacttagtgacggacttaacatgagacataaataaatccaaattttttttacaaacatcactagccaccataatggcggtatctttcaaccagctatcgcttacgcattttagcagtctaacatttttaaagagactacaatatattctcatagtatcgattacacctctaccgaatagagtgggaagtttaataatacaatatttttcgtttacaaaatcaaataatggtcgaaacacgtcaaaggttaacattttataatcgctaatgtataaattgttttcagttagatgattattagatttaatggcgtctcgttcacgtttgaacagtttattgcgtgcgctgaggtcggcaactacggcgtccgctttagtactcctaccgtaatactttacgctattaatctttaaaatttcatagactttatctagatcgctttctggtaacatgatatcatgtgtaaaaagttttaacatgtctgttggcattctatttagatcattaactctagaaatctgaagaaagtaattagctccgtattccagactaggtaatgggcttttacctaaagacaagttaagttctggcaatgtttcataaaatggaagaaggacatgcgtcccctcccgaatattttttacaatttcatccatttacaactctatagtttgttttcattattattagttattatctcccataatcttggtaatacttaccccttgatcgtaagataccttatacaggtcattacatacaactaccaattgtttttgtacataatagattggatggttgacatccatggtggaataaactactcgaacagatagtttatctttccccctagatacattggccgtaatagttgtcggtctaaagaatatctttggtgtaaagttaaaagttagggttcttgttccattattgctttttgtcagtagttcattataaattctcgagatgggtccgttctctgaatatagaacatcatttccaaatctaacttctagtctagaaataatatcggtcttattcttaaaatcgattcctttgatgaagggatcgttaataaacaaatccttggcctttgattcggctgatctattatctccgttatagacgttacgttgactggtccaaagacttacaggaatagatgtatcgatgatgttgatagtatgtgatatgtgagcaaagactgttctcttggtggcgtcactatatgttccagtaatggcggaaaactttttagaaatgttatatataaaagaattttttctggttccaaacattagcagattagtatgaagataaacactcatattatcaggaacattatcaatttttacatacacatcagcatcttgaatagaaacaataccatcttctggaacctcgacgatctcggcagactccggataaccagtcggtggaccatcgctaacaataactagatcatccaacaatctactcacatatgcgtcaatataatctttttcatcttgtgagtaccctggatacgaaataaatttattatccgtatttccataataaggtttagtataaacagagagagatgttgctgcatgaacttcggttactgtcgccgttggttggtttatttgacctattactctcctaggtttctctataaatgatggtttaatttgtacattcttaaccatatatccaataaagctcaattcaggtacataaacaaattctttgttgaacgtttcaaagtcgaacgaagagtcacgaataacaatatcggatactggattgaaggtcaccgttacggtaatttttgaatcggatagtttaagactactgaatgtatcttccacatcaaacggagttttaatataaacgtatactgtagatggttctttgatagtgtcattaggagttaggccaatagaaatatcattaagttcactagaatatccagaatgtttcaaagcaattgtgttgttgatacaattattatataattcttcgccctcaatttcccaaataacaccgttacacgaagagatagatacgttattaatacatttatatccaacatatggcacgtaaccgaatcttcctattcctttaacttctggaagttccaaactcagaaccaaatgattaagcgcagtaatgtactgatccctaatctcgaagctagcaatagcctgattgtcgggaccgtcgtttgtcataactccggatagagaaatatagtgcggcatatacaaagttggaatttgactatcgaccgcgaagacattagaccgtttaatagagtcatccccaccgatcaaagaattaatgatagtattattcattttctatttaaaatggaaaaagcttacaataaactccgtagagaaatatctataatttgtgagttttccttaaagtaacaacttccgtaaactccgtctttatctcttagtaagtttattgtatttatgaccttttccttatcttcatagaatactaaaggcaacaaagaaatttttggttcttctctaagagctacgtgagacttaaccatagaagccaacgaatccctacatattttagaacagaaataccccacttcaccaccattgtatgtctcaatactaataggtctaaaaaccaaatcttgattacaaaaccaacacttatcaattacactatttgtcttaatagacacatctgccatagatttataatactttggtagtatacaagcgagtgcttcttctttagcgggcttaaagactgctttaggtgccgaaataaccacatctggaaggcttactcgcttagccatttaattacggaactatttttttatacgtctaatgagcaagtagaaaacctctcgtctacaaaaacatactcgtgtccataatcctctaccatagtaacacgttttttagatcgcatatgcgctaaaaaattttcccatactaattggttactattatttttcgtataattcttgaccgtttgaggttttagatttttagttacggaagtgatatcgaatattttatccaaaaagaatgagtaattaattgtcttagaaggagtgttttcttggcaaaagaataccaagtgcttaaatatttctactacttcattaatcttttctgtactcagattcagtttctcatcttttacttgattgattatttcaaagactaacttataatcctttttatttattctctcgttagctttaagaaaaccagatacaaaatttgcatctacatcatccgtggatatttgatttttttccatgatatccaagagttccgagataatttctccagaacattgatgagacaataatctccgcaatacatttctcaaatgaataagtttattagacacgtggaagttcgactttttttgtatctttgtacatttttgaaatacagactcgcaaaaaatacaatattcatatccttgttcagatactataccgttgtgtctacaaccgctacataatcgtagattcatgttaacactctacgtatctcgtcgtccaatattttatataaaaacattttatttctagacgttgccagaaaatcctgtaatacttttagtttttggggttgtgaataaagtatcgccctaatattgttacagtcttccgccaatatagtagttaaattatccgcacatgcagaagaacaccgcttaggtggattcagtacaatgttatatttttcgtaccaactcatttaaatatcataatctaaaatagttctgtaatatgcctagcgctaatatattgatcataatcctgtgcataaattaagatacaacaatgtcttgaaatcatcgacatggcttcttccatagttagaagatcgtcgtcaaagttagcaacgtgattcatcaacatttgctgttttgaggcagcaaatactgaaccatcgccattcaaccattcataaaaaccatcgtctgaatccattgataatttcttgtactggtttttgagagctctcatcaatctagcatttctagctcccggattgaaaacagaaagaggatcgtacatccagggtccattttctgtaaatagaatcgtataatgtcccttcaagaagatatcagacgatccacaatcaaagaattggtctccgagtttataacagactgcggactttaacctatacatgataccgtttagcatgatttctggcgatacgtcaattggagtatcatctattagagatctaaagccggtgtaacattctccaccaaacatattcttattctggcgtcgttctacataaaacatcattgctccattaacgataacaggggaatgaacagcactacccatcacattagttcccaatggatcaatgtgtgtaactccagaacatcttccatagcctatgttaggaggagcgaacaccactcttccactattgccatcgaatgccatagaataaatatccttggaattgatagaaatcggactgtcggatgttgtgatcatcttcataggattaacaacgatgtatggcgccgcctgaagtttcatatcgtaactgatgccgttcataggtctagccacagaaaccaacgtaggtctaaatccaactatagacaaaatagaagctaatatctgttcctcatcggtcataacttgagagcatccagtatgaataatcttcattagatggggatctaccgcatcatcatcgttacaataaaaaattcccattctaatgttcataattgcttttctaatcatggtatgcatgtttgctctctgaatctctgtggaaattagatctgatacacctgtaatcactatcggattatcctccgtaagacgattaaccaacaacatataattataagactttactcttctaaattcataaagttgctggattagactatatgtgtctccatgtacatacgcgttctcgagcgctggaagtttaataccgaatagtgccatcagaataggatgaatgtagtaattagtttctggttttctataaataaaagacaaatcttgtgaactagacatatcggtaaaatgcatggattggaatcgtgtagtcgacagaagaatatgatgattagatggagagtatattttatctaactctttgagttggtcaccgattctaggactagctcgagaatgaataagtactaaaggatgagtacatttcacagaaacactagcattgttcaacgtgctctttacatgggtaaggagttgaaatagctcgtttctatttgttctgacaatatttagtttattcataatgttaagcatatcctgaatagtaaagttagatgtgtcatacttgttagtagttagatatttagcaattgcattcccatcatttctcaatctcgtactccaatcatgcgtggatgctacttcgtcgatggaaaccatacaatcctttttgataggctgttgagattgattatttcctgcacgtttaggtttggtacgttgatttctagctcctgcggatataaagtcatcgtctacaatctgggataatgaattgcatacactacaagacaaagatttatcagaagtgtgtatatgatcttcatctaccaaagaaagagtttgattaatataactagattttagtcctgcgttagatgttaaaaacccatcactattgagcacggcttccattatttatattcgtagtttttactcgaaagcgtgattttaatatccaatcttattacttttggaatcgttcaaaacctttgactagttgtaaaatttgatctattgccctacgtgtatattcccttgcatcatatacattcgttaccagatcagttgtttcggcttgaagttgatgcatatctttttcaacactcgacatgagatccttaagggacatatcgtctagattttgttgtgatattgctcctggatttggattttgttgtgctgttgtacatactgtaccaccagtaggtgtaggagtacatacagtggccacaataggaggttgaggaggtgtaaccgttggagtagtacaagaaatacttccatccgattgttgtgtacatgtggttgttggcaacgtctgagaaggttgggtagatggcggtgttgtcgtcttttgatctttattaaatttagagataatatcctgaacagcattgctcggcgtcaacgctggaaggagtgaattcgactgtgtatcggtatctgacgacaaccaatcaaaaagattagacatatccgatgatgtattagtttgttgtcgtggttttggtgtaggagcagtactactaggtagaagaatagcagacggtgtagatgtcggaaccggctgtggagttatatgaattgttggttgtagcggttggataggccgtctattggcgaccatcatattatctctagctagttgttctcgcaactgtctttgataatacgactcttgagactttagtcctatttcaatcgcttcatcctttttcgtatccggatccttttcttcagaataatagattgatgactttggtgtagaggcttctaccagcccctgtgagaacttgttaaagaagtccatttaaggctttaaaattgaattgcgattataagattaaatggcagacacagacgatattatcgactatgaatccgatgatctcaccgaatacgaggatgatgacgaagaggaagaagatggagagtcactagaaactagtgatatagatcccaaatcttcttataagattgtagaatccgcatccactcatatagaagatgcgcattccaatcttaaacatatgggaaatcatatatctgctcttaaacgacgctatactagacgtataagtctatttgaaatagcgggtataatagcagaaagctataacttgcttcaacgaggaagattacctctagtttcagaattttctgacgaaacgatgaagcaaaatatgctacatgtaattatacaagagatagaggagggttcttgtcctatagtcatcgaaaagaacggagaattgttgtcagtaaacgattttgacaaagatggtctaaaattccatctagactatattatcaaaatttggaaacttcaaaaacgatattagaatttatacgaatatcgttctctaaatgtaacaatcaagtctcgcatgttcagcagtttattgtcgtactttatatcgtgttcattaacgatattttgcaaaatagtaatgattctatcttccttcgatagatattcttcagagattattgtcttatattctttcttgttatccgatatgaatttgataagactttgaacattattaattcccgtctgtttaattttttctacggatattttagttttggcagattctatcgtatctgttaatagacacccaacatcaacattcgacgtcaattgtctataaatcaacgtataaattttagaaataacattagcaaattgttgggcgttgatgtcgttattctgaaacagtatgattttaggtagcattttcttaacaaagagaacgtatttattattactcagttgaacagatgatatatccagattactaacacatctgattccgtataccaaactttcagaagaaatggtatacaattgtttgtattcattcaatgtctctttttcagaaattagtttagaatcgaatactgcaataattttcaagagatagttttcatcagataagattttatttagtgtagatatgataaaactattgttttgttggagaacttgatacgccgcattctctgtagtcgacgctctcaaatgggaaacaatctccattatttttttggagtcggatacgatatcttcggtatcttgacgcaatctagtatacatagagttaagagaaattatagtttgtacattgagcaacatgtctctaaatgcgactacaaatttttccttttccacatcatctagtttattatataccgatttcacaacagcaccagatttaaggaaccagaatgaaaaactctgataactacaatatttcatcatagttacgattttatcatcttctatagttggtgtgatagcgcatacctttttctccaagactggaaccaatgtcataaaaatgtttaaatcaaaatccatatcaacatctgatgcgctaagaccagtctcgcgctcaagattatctttactaatggtgacgaactcatcgtatagaactctaagtttgtccattatttatttacagatttagttgtttaatttatttgtgctcttccagagttgggatagtatttttctaacgtcggtattatattattaggatctacgttcatatgtatcataatattaatcatccaggttttgataaatctatctttagcttctgaaataacgtatttaaacaaaggagaaaaatatttagctacagcatcagacgcaataacattttttgtaaatgtaacgtatttagacgacagatcttcgttaaaaagttttccatctatgtagaatccatctgttgttaacaccattcccgcgtcagattgaataggagtttgaatagtttgttttggaaatagatccttcaataacttatagttgggtgggaaaaaatcgattttatcactagactctttcttttttactatcattacctcatgaactatttcttgaatgagtatatgtattttctttcctatatcagacgcgttcattggaaaatataccatgtcgttaactataagaatatttttatcctcgtttacaaactgaataatatcagatgtagttcgtaaacgaactatatcatcaccggcacaacatctaactatatgatatccactagtttcctttagccgtttattatcttgttccatattagcagtcattccatcatttaagaaggtgtcaaagataatagggagaaatgacattttggattctgttacgactttaccaaaattaaggatatacggacttattatctttttttcaacgtcgatttgatgaacacacgatgaaaatgtacttcgatgagattgatcatgaagaaaacaacaagggatacaatatttccgcatatcatgaaatatattaagaaatcccactttattatatttccccaaaggatccatgcacgtaaacattataccgttatcattaataaatacttctttctcatcggatctgtaaaagttgttactgatttttttcattccaggatctagataattaataatgatgggttttctattcttattctttgtattttgacatatcctagaccagtaaacagtttccactttggtaaaatcagcagacttttgaacgctattaaacatggcattaatggcaataactaaaaatgtaaaatatttttctatgttaggaatatggtttttcactttaatagatatatgttttttggccaaaatgatagatatttttttatccgaggatagtaaaatattattagtcgccgtctctataaaaatgaagctagtctcgatatccaattttattctagaattgataggagtcgccaaatgtaccttatacgttatatctcccttaatgcgttccatttgtgtgtctatatcggatacaagatcagtaaatagtttcacattattaatcatcacagtatcgccgtcgctagataatgctaatgtgccatccaagtcccaaatggagagatttaactgttcatcgtttagaataaaatgattaccggtcatattaataaagtgttcatcgtatctagataacgccgacttataattaatgtccaagtcttgaactcgctgaataatcttttttaacccagttagttttagattggtacgaaatatattgttaaactttgattctacagtaatgtccaaatcgagtcgtggaaatacttccatcaacattgtttcaaacttgataatattattatctacatcttcatacgatccaaattccggaatagatgtatcacatgctcttgccacccagataaccaaaaagtcacacgctccaggatatacattgtataaaaagctatcgtttttaagtagggtttttttctgcgtatatacgaagggattaaaaatagtattatcaacgtaactatattccaaattattcttatgagaatagataataatatcgtccttaatatctaacaaatttcctaaatatccctttaattgagtcattcgaagcgtcaataaaatatgtctcttaactatttccggccgttgtatatttaaatgacttcgtaagaaataatatatgggcgacttctcatctatgtaatcatatggagtgagatatagggctcgttctacctcctgccccttacccacctgtaataccaattgcggactcactgtatatcgcatatttatatcgtggggtaaagtgaaaatctactaccgatgatgtaagtcttacaatgttcgaaccagtaccagatcttaatttggaggcctccgtagaactaggggaggtaaatatagatcaaacaacacctatgataaaggagaatagcggttttatatcccgtagtagacgtctattcgcccatagatctaaggatgatgagagaaaactagcactacgattctttttacaaagactttattttttagatcatagagagattcattatttgttcagatgcgttgacgctgtaaaagacgtcactattaccaaaaaaaataacattatcgtggcgccttatatagcacttttaactatcgcatcaaaaggatgcaaacttacagaaacaatgattgaagcattctttccagaactatataatgaacatagtaagaaattcaaattcaactctcaagtatccatcatccaagaaaaactcggataccagtctggaaactatcacatttatgattttgaaccgtattactctacagtagctctggctattcgagatgaacattcatctggcatttttaatatccgtcaagagagttatctggtaagttcattatctgaaataacatatagattttatctaattaatctaaaatctgatcttgttcaatggagtgctagtacgggcgctgtaattaatcaaatggtaaatactgtattgattacagtgtatgaaaagttacaactggtcatagaaaatgattcacaatctacatgttcattggctgtggaatcagaacttccaataaaattacttaaagatagaaatgaattatttacaaaattcatcaacgagttaaaaaagaccagttcattcaagataagcaaacgcgataaggatacgttactaaaatattttacttaggagttagaatttatagacgactcatttcgtgtatcattgttactattactattactattactattactattactatcattattagtgttggtattattagtattcttcttgtcatcttgttcagaaatatacagcaatgctatacctaatactaaatacattatcatgcttgcaatggctctaacaacgacgaaccaaaatgaatttggtcgtagcttttgttcacaaaaatacataaagaaatgtctacataaatctatggcgccattggctacttgaaatagcgccagtcctcctacagattttaatatagctgtataacatgacatttattcatcatcaaaagagacagagtcaccatctgccatatttagattttttttcatgtgttcaaagtatcctctactcatttcattataatagtttatcatacttagaattttaggacggatcaatgagtaagacttgactagatcgtcagtagtaatttgtacatcgtctattctgcatccgcttcgtcgaataatgtatagcatcgctttgagattctccatagctatcaagtctttatacaatgacatggaaatatctgtgaatactttatacttctccaacatcgatgccttaacatcatcgcctactttagcattgaaaatacgttctattgtgtagatggatgtggcaagatttttaaacaacaatgccatcttacacgatgattgcctcaagtctccgatcgtttgtttagaacgattagctacagagtccaatgcttggctgactaacatattattatctttagaaattgtattcttcaatgaggcgtttatcatatctgtgatttcgttagtcatattacagtctgactgggttgtaatgttatccaacatatcacctatggatacggtacacgtaccagcatttgtaataatcctatctaagatgttgtatggcattgcgcagaaaatatcttctcctgtaatatctccactctcgataaatctactcagattattcttaaatgccttattctctggagaaaagatatcagtgtccatcatttcattaatagtatacgcagaaaagataccacgagtatcaattctatccaagatacttatcggttccgagtcacagataatggtttcctctccttcgggagatcctgcatagaaatatctaggacaatagtttctatactgtctgtaactctgataatctctaaagtcactaactgataccatgaaattgagaagatcaaacgctgaagtaatcaatttttctgcctcgtttttactacaactagttttcatcaatgtagtgacgatgtattgtttagttactcttggtctaatactgatgatagagatattattgcttcccataatggatcttctagtagtcaccttaaagcccattgatgcgaatagcagatagataaagtcttggtatgactcctttctaatatagtacggactacctttgtcacccaactttatacccacataagccataacaacctctttaatagccgtttcatgaggtttatcagccatgagcctgagtagttggaagaatctcatgaatcccgtctcggacagtcctatatgcatgatagatttatctttcctgggaaactctcgtatagtcatagatgaaatactcttcaaagtttctgaaataagattagtaacagtcttacctccgactactctgggtaacaaacatactctaataggtgttttctctgcggagataatatcagaaaggatagagcaataagtagtattattgtgattataaagaccgaatacataacaggtagaatttataaacatcatgtcctgaaggtttttagacttgtattcctcgtaatccataccgtcccaaaacatggatttggtaactttgatagccgtagatctttgttccttcgccaacatactaaggaaagtaataaagaatttgttgtttctatttatgtccacaaattgcacgtttggaagtgcaactgttacgttcactgcagcattttgaggatctcgagtatgaagtacgatgttattgtttactggtatatctggaaagatttctaccagtctaggaataagagattgatatctcatagaaatagaaaagtttataatctcatcatcaaagatcattctgttaccattgtaataaattggtactctatcataatcatcgacaaagtactgttcatacatgatgagatgtttatatgttggcatagtagtgagatcgacgtttggtaatggcaatgtattaagattaactccataatgtctagcagcatctgcgatgttataagtgttgtcaaatcggggtcgatcttgtgctgttatatattgtctaacacctataagattatcaaaatcttgtctgcttaatacaccgttaacaatttttgccttgaattcttttattggtgcattaataacatccttatagaggatgttaaacaaataagtattatcgaagttaagatctgggtatttcttttctgctagaacatccattgagtcggagccatctggtttaatataaccaccgataaatctagctctgtattctgtatccgtcaatctaatattaagaaggtgttgagtgaaaggtggaagatcgtaaaagttgtgagtattaataatagggttagtttccgaactaatgttaattggatgattaataatatcgatatttccagcgttaagtgtgacattaaacagtcttaattcacttgacgtggtatcaattaaataattaatgcccaatttggatatagcagcttgaagctcatcttgtttagttacggatcctaatgagttattaagcaatacatcgaacggatgaacgaaggttgttttgagttggtcacatactttgtaatctagacatagatgcggaagaacggtagaaactatacgaaatagatattcagagtcctctaattgatcaagagtaactattgacttaataggcatcatttatttagtattaaatgacgaccgtaccagtgacggatatacaaaacgacttaattacagagttttcagaagataattatccatctaacaaaaattatgaaataactcttcgtcaaatgtctattctaactcacgttaacaacgtggtagatagagaacataatgccgccgtagtgtcatctccagaggaaatatcctcacaaattaatgaagatctatttccagatgatgattctccggccactattatcgaaagagtacaacctcatactactattattgacgatactccacctcctacttttcgtagagagttattgatatcggaacaacgtcaacaacgagaaaaaagatttaatattacagtatcgaaaaatgctgaagcaataatggaatctagatctatgataacttctatcccaacacaaacaccatccttgggagtagtttatgataaagataaaagaattcagatgctagaggatgaagtggttaatcttagaaatcaacgatctaatacaaaatcatctgataatttggataattttaccagaatactatttggtaagactccgtataaatcaacagaagttaataagcgtatagccatcgttaattatgcaaatttgaacgggtctcccttatcagtcgaggacttggatgtttgttcggaggatgaaatagatagaatctataaaacaattaaacaatatcacgaaagtagaaaacgaaaaattatcgtcactaacgtgattattattgtcataaacattatcgagcaggcattgctaaaactcggatttgaagaaatcaaaggactgagtaccgatatcacttcagaaattatcgatgtggagatcggagatgactgcgatgctgtagcatcaaaactaggaatcggtaacagtccggttcttaatattgtattgtttatactcaagatattcgttaaacgaattaaaattatttaatttaatacattcccatatccagacaacaatcgtctggattaacttgttcctgtcgtctcataccggacgacatattaatctttttattagtatgcatctttttagatgatttctttttcccagcattaactgattcgatacctagaagatcgtgattgatctctccgaccattccacgaacttctaattgaccgtctctaacggtaccataaactattttaccagcattagtaacagcttggacaatctgaccatccattgcgttgaatgatgtagttgctgttgttctacgtctaggagcaccagaagtatttttggagcccttggatgttgatgtagaagaagacgaggattttgattttggtttacatgtaatacattttgaactctttgattttgtatcacatgcgccggcagtcacatctgtttgagaattaagattattgttgcctcctttgacggctgcatctccaccgatttgcgctagtagatttttaagctgtggtgtaatcttattaactgtttcgatataatcatcgtaactgcttctaacggttaaattttttttatccgccatttagaagctaaaaatatttttatttatgcagaagatttaactagattatacaatgaactaatatgatccttttctagattatttacaaacttggtatttcttggttctggaggaggtggattaggatccggattttgtgggctcttgatcttattatacagcgcgtataggatggcgacagtaactgctacacaaatgccgatcaaaagaagaataccaatcatttattgacaataacttcactatgatcaagtatgtaatatatatcatcttttcactaaataagtagtaataacgattcaacaatgtcgagatatatggacgataataatttagttcacggaaatatcgctatgattggtgtgaatgactccgctaactctgtggggtgcgcagtgctttccccacatagaataaattagcattccgactgtgataataataccaagtataaacgccataatactcaatactttccatgtacgagtgggactggtagacttactaaagtcaataaaggcgaagatacacgaaagaatcaaaagaatgattccagcgattagcacgccggaaaaataatttccaatcataagcatcatgtccatttaactaataaaaattttaaattgccgaatgaacaaagtggaatataaaccatataaaaacaatagtttgtactgcaaaaataatatctatttttgttttcgaagatatggtaaaattaaatagtagtacacaacatgttataactaacagtagcaacggctcgtaattacttatcatttactagacgaaaaggtggtgggatattttcttgctcaaataatacgaatatatcacccatccattttatgcgatgtttatatactctaatctttaataaatctatagacgacgggtttaccaacaatatagattttatcgattcatctaatttaaacccttccttaaacgtgaatgatttattatctggcataacgatgaccctacctgatgaatcggataatgtattgggccatgtagaataaattatcaacgaattatcgtctacgaacatttatatcatttgttttaattttaggacgcgaataaatagatataaaatagaaaataacagatattacaaccagtgttatggccgcgcccaaccaggtaggcagttttattttatcttttactacaggttctcctggatgtacgtcaccaactgcagacgtagttctagtacaattagacataagttccgcttgggaattttttaacgctaaagagttaacgttaaccgtacacccaacgtatttacatctagttctttgaacatcttgattataatataaccattttctatctctagattcgtcagtgcactcatgtaaccaacataccctaggtcccaaatatttatctccggaatttgattttggataattcgcacaccaacaatttctatttcctttatgatcgttacaaaagacatataatgctgtatccccaaaagtaaaataatcaggacgaacaattctaataaactcagaacaatatctcgcatccatatgtttggaacaaatatcagaataagtagacatagccggttttcgttttgctcgtaaccattctaaacaattggggtttccaggatcgtttctacaaaatccagtcatgaaatcgtcacaatgttcggtcttgtaattattattaaatatttttggacagtgtttggtatttgtcttagaacaacattttgccacgctatcgctatcgcccaggagataatccttttttataaaatgacatcgttgcccggatgctatataatcagtagcatgttttaaatccttaatatattcaggagttacctcgttctgataatagattaatgatccaggacgaaatttgaaagaactacatggttctccacgaattaatacatattgtttagcaaattcaggaactataaaactactgcaatgatctatcgacataccatctatcaaacaaaatttgggtttaatttctcctggagacgtttcataataatacatataactttcttcggcaaacctaacagctctattatattcaggataattaaaacctaataccatatatttgtctcgtatatctgctattcctgtctctattttgatgctattaagagtaacagctgcccccattcttaataatcgtcagtatttaaactgttaaatgttggtatatcaacatctatcttatttcccgcagtataaggtttgttacatgtatgatgttcaggaatggttatatttattcttttatagtcctgtctttcgatgttcatcacatatgcaaagaacagaataaacaaaataatgtaagaaataatattaaatatctgtgaattcgtaaatacattgattgccataataattacagcagctacaatacacacaatagacattcccacagtgttgccattacctccacgatacatttgagttactaagcaataggtaataactaagctagtaagaggcaatagaaaagatgagataaatatcatcaatatagagattagaggagggctatatagagccaagacgaacaaaatcaaaccgagtaacgttctaacatcattatttttgaagattcccaaataatcattcattcctcgataatcgttttgtatcatacctccatctgtaggcataaacgattgttgctgttcctctgtaaataaatctttatcaagcactccagcacccgcagagaagtcgtcaagcatattgtaatatcttaaataactcatttatatattaaaaaatgtcactattaaagatggagtataatctttatgccgaactaaaaaaaatgacttgtggtcagcccataagtctttttaatgaagacggtgatttcgtagaagttgaaccaggatcatcctttaagtttctaatacctaagggattttactcctctccttccgtaaagacgagtctagtattcgagacattaacaacgaccgataataaaattactagtatcaatccaataaatgcgccaaagttatatcctcttcaacgcaaagtcgtatctgaagtagtttctaatatgaggaaaatgatcgaattaaaacgtcctctatacatcactcttcacttggcgtgtggatttggtaagactattaccacgtgttatcttatggccacgcacggcagaaaaaccatcatttgcgtacccaataaaatgttaatacatcaatggaagacattggtagaggcagtcggattggaacataagatatctatagatggtgttagtagtctattaaaggaactaaagactcaaagtccggatgtattaatcgtagtcagtagacatctgacaaacgatgcattttgtaaatatatcaataagcattatgatttgttcatcttggatgaatcacatacgtataatctgatgaacaatacagcagttacaagatttttagcgtattatcctccgatgatgtgttattttttaactgctacacctagaccagctaacagaatttattgtaacagtattattaatattgccaagttatccgatctaaaaaaaactatctatgtagtggatagtttttttgatccatattccacagataatattagacatatgataaaacgactagatggaccatctaataaatatcatatatataccgagaagttattatctgtagacgagcctagaaatcaacttattcttgataccctggtagaagaattcaaatcgggaactattaatcgaattttagttattaccaaactacgtgaacatatggtaatgttctacaaacgattattagatcttttcggaccagaggttgtatttataggagacgcccaaaatagacgtactccagatatggtcaaatcaatcaaggaactaaatagatttatatttgtatccaccttattttattccggtactggtttagatattcctagtttggattctttgttcatttgctcagcagtaatcaacaatatgcaaatagagcaattactagggagggtatgtcgagaaacagaactattagataggacggtatatgtatttcctagcacatccattaaagaaataaagtacatgataggaaattttgtacaacgaattattagtctatctgtagataaactaggatttaaacaagaaagttatcggaaacatcaagaatccgatcccacttctacatgtacaacatcctccagagaagaacgtgtattaaatagaatatttaactcgcaaaatcgttaagaagtttaagcgacgatccgcatgctgcacaggccagtgtattacccctcatagtattaatataatccaatgatacttttgtgatatcggaaatcttaaccaatttagactgacagacagaacacgtcatgcaatcatcatcgtcatcgataactgtagtcttgggcttctttttgcggctcttcattccggaacgcgcgttggtactatccatttaggtagtaaaaaataagtcagaatatgccctatagcacgatcgtacaaaacctggtagtatatcgtctctatctttatcacaatatagtgtatcgacatctttattattattgacctcgtttatcttggaacatggaatgggaacatttttgttatcgacagccacctttgccttaattccagatgttgtaaaattataactaaacattctatcatcgacacaaatgaaattcttgtttagacgtttgtagtttacgtatgcggctcgttctcgtctcattttttcagatattgcaggtactataatattaaaaataagaatgaaataacataggattaaaaataaagttatcatgacttctagtgctgatttaactaacttaaaagaattacttagtctgtacaaaagtttgagattttcagattctgcggctatagagaagtataattctttggtagaatggggaacatctacttactggaaaataggcgtacaaaaggtagctaatgtcgagacgtccatatctgattattatgatgaggtaaaaaataaaccgtttaatattgatccggggtattatattttcttaccggtatattttggaagcgtctttatttattcgaagggtaaaaatatggtagaactaggatctggaaactcttttcaaataccagatgatatgcgaagtgcgtgtaacaaagtattagacagcgataacggaatagactttctgagatttgttttgttaaacaatagatggataatggaagatgctatatcaaaatatcagtctccagttaatatatttaaactagcgagtgagtacggattaaacatacccaaatatttagaaattgaaatagaggaagacacattatttgacgacgaattatactctattatagaacgatctttcgatgataaatttccaaaaatatctatatcgtatattaagttgggagaacttaagcggcaagttgtagactttttcaaattctcattcgtgtatattgagtccatcaaggtagatcgtataggagataatatttttattcctagcgttataacaaaatcaggaaaaaagatattagtaaaagatgtagaccatttaatacgatccaaggttagagaacatacatttgtaaaagtaaaaaagaaaaacacattttccattttatacgactatgatgggaacggaacagaaactagaggagaagtaataaaacgaattatagacactataggacgagactattatgttaacggaaagtatttctctaagattggtagtgccggcttaaagcaattgactaataaattagatattaatgagtgtgcaaccgtcgatgatttagttgatgagattaataaatccggaactgtaaaacgaaaaataaaaaaccaatcagtatttgatttaagcagagaatgtttgggatatccagaagcggattttataacgttagttaataacatgcggttcaaaatagaaaattgtaaggttgtaaatttcaatattgaaaatactaattgtttaaataacccgagtattgaaactatatatggaaactttaaccagttcgtctcaatctttaataccgttaccgatgtcaaaaaaagattattcgagtgaaataatatgcgcctttgatataggtgcaaaaaatcctgctagaactgttttagaagtcaaggataactccgttagggtattggatatatcaaaattagactggagttctgattgggaaaggcgcatagctaaagatttgtcacaatatgaatacactacagttcttctagaacgtcagcctagaaggtcaccgtacgtcaaatttatctattttattaaaggctttttatatcatacatcggctaccaaagttatttgcgtctcgcctgtcatgtctggtaattcatatagagatcgaaaaaagagatctgttgaagcatttcttgattggatggacacatttggattgcgagactccgttccggatagacgcaaattagacgatgtagcggatagtttcaatttggctatgagatacgtattagataaatggaatactaattatacaccttataatagatgtaaatctagaaattacataaaaaaaatgtaataacgttagtaacgccattatggataatctatttacctttctacatgaaatagaagatagatatgccagaactatttttaactttcatctaataagttgcgatgaaataggagatatatatggtcttatgaaagaacgcatttcctcagaggatatgtttgataatatagtatataataaagatatacatcccgccattaagaaactagtttattgcgacatccaacttactaaacacattattaatcagaatacgtatccggtatttaacgattcttcacaagtgaaatgttgtcattatttcgatataaactcagataatagcaatattagctctcgtacagtagagatatttgagagggaaaagtcatctcttgtatcatatattaaaactaccaataagaagagaaaggtcaattatggggaaataaagaaaactgtacatggaggcactaatgcaaattacttttccggtaaaaaatctgatgagtatttgagcactacagttagatccaacattaatcaaccttggatcaaaaccatctctaagaggatgagagtcgatatcattaatcactctatagtaacgcgtggaaaaagctctatattacaaactatagaaattatttttactaatagaacatgtgtgaaaatattcaaggactctactatgcacattattctatccaaggacaaggatgaaaaggggtgtatacacatgattgataaattattctatgtctattataatttatttctgttgttcgaggatatcatccaaaacaaatactttaacgaagtagccaatattgtaaaccacgtactcacggttacggcattagatgagaaattattcctaattaagaaaatggctgaacacgatgtttatggagttagcaatttcaaaatagggatgtttaacctgacatttattaagtcgttggatcatacagttttcccctctctgttagatgaggatagcaaaataaagttttttaaggggaaaaagctcaatattgtagcattacgctctctggatgattgtataaattacgtgactaaatccgagaatatgatagaaatgatgaaggaaagatcgactattttaaatagcatagatatagaaacggaatcggtagatcgtctaaaagaattgcttctaaaatgaaaaaaaacactgattcagaaatggatcaacgactaggatataagtttttggtgcctgatcctaaagccggagttttttatagaccgttacatttccaatatgtatcgtattctaattttatattgcatcgattgcatgaaatcttgaccgtcaagcggccactcttatcgtttaagaataatacagaacgaattatgatagaaattagcaatgttaaagtgactcctccagattactcacctataatcgcgagtattaaaggtaagagttatgacgcattagcaacgttcactgtaaatatctttaaagaggtaatgaccaaagagggtatatccatcactaaaataagtagttatgagggaaaagattctcatttgataaaaattccgctactaataggatacgggaataaaaatccacttgatacagccaagtatcttgttcctaatgtcataggtggagtctttatcaataaacaatctgtcgaaaaagtaggaattaatctagtagaaaagattacaacatggccaaaatttagggttgttaagccaaactcattcactttctcgttttcctccgtatcccctcctaatgtattaccgacaagatatcgccattacaagatatctctggatatatcacaattggaagcatcgaatatatcatctacaaagacatttataacggtcaatattgttttgctgtctcaatatttatctagagtgagtctagaattcattagacgtagtttatcatacgatatgcctccagaagttgtgtatctagtaaacgcgataatagatagtgctaaacgaattactgaatctattactgactttaatattgatacatacattaatgacctggtggaagctgaacacattaaacaaaaatctcagttaacgattaacgagttcaaatatgaaatgctgcataactttttacctcatatgaactatacacccgatcaactaaagggattttatatgatatctttactaagaaagtttctctactgtatctaccacacttctagatatccagatagagattcgatggtttgtcatcgtatactaacatacggcaaatattttgagacgttggcacatgatgaattagagaattacataggcaacatcagaaacgacatcatgaacaatcacaagaacagaggcacttacgcggtaaacattcatgtactaacaactcccggacttaatcatgcattttctagtctattgagtggaaagttcaaaaagtcagacggtagttatcgaacacatcctcactattcatggatgcagaatatttctattcctagaagtgttggattttatcctgatcaagtaaagatttcaaagatgttttctgtcagaaaataccatccaagtcaatatctttacttttgttcatcagacgttccggaaagaggtcctcaggtaggtttagtatctcaattgtctgttctgagttccattacaaatatactaacgtctgagtatttggatttggaaaagaaaatttgtgagtatatcagatcatattataaagatgatataagttactttgaaacaggatttcctattactatagaaaatgctctagtcgcatctcttaatccaaatatgatatgtgattttgtaactgactttagacgtagaaaacggatgggattcttcggtaacttggaggtaggtattactttagttagggatcacatgaatgaaattcgcattaatattggagcaggaagattagtcagaccattcttggttgtggataacggagagctcatgatggatgtgtgtcaggagttagaaagcagattagacgacatgacattctctgacattcagaaagagtttccacatgtcatcgaaatggtagatatagaacaatttacttttagtaacgtatgtgaatcggttcaaaaatttagaatgatgtcaaaggatgaaagaaagcaatacgatttatgtgactttcctgccgaatttagagatggatatgtagcatcttcactagtgggaatcaatcacaattctggacccagagctattcttggatgtgctcaagctaaacaagctatctcttgtctgagttcggatatacgaaataaaatagacaatggaattcatttgatgtatccagagagaccaattgtcattagtaaggctttagaaacttcaaagattgcggccaattgcttcggacaacatgttactatagcattaatgtcgtacaaaggtatcaatcaagaggatggaattatcatcaaaaaacaatttattcagagaggcggtctcgatattgttacagccaagaaacatcaagtagaaattccattggaaaactttaataacaaagaaagagataggtctaacgcctattcaaaattagaaagtaatggattagttagactgaatgctttcttggaatccggagacgctatggcacgaaatatctcatcaagaactcttgaagatgattttgctagagataatcagattagcttcgatgtttccgagaaatataccgatatgtacaaatctcgcgttgaacgagtgcaagtagaacttactgacaaagttaaggtacgagtattaaccatgaaagaaagaagacccattctaggagacaaatttaccactagaacgagtcaaaagggaacagtcgcgtatatcgcggatgaaactgaacttccatacgacgaaaatggtatcacgccagatgtcattattaattctacatccatcttctctagaaaaactatatctatgttgatagaagttattttaacagcagcatattctgctaagccgtataacaataatggagaaaacagacctgtctgttttccgagtagtaacgaaacatcgatagatacatatatgcaattcgctaaacaatgttacgagcattcaaatccacaattgacagatgatgaattgtcggataaagtcttttgtgaaaagattctctacgatccagaaacggataaaccttatgcatccaaagtattttttggaccaatttattacttgcgtctgagacatttaactcaggataaggccaccgttagatgtagaggtaaaaagacgaagctcattagacaagcaaatgagggacgaaaacgtggaggtggtatcaagttcggagaaatggagagagactgtttaatagcacatggtgcagcaaatactattacagaagttttgaaagattcggaagaagactatcaagacgtatacatttgtgaaaactgtggagatatagcagcacaaattaaaggtattaatacatgtcttcgatgttcaaaacttaatctctctcctctattaacaaaaatagataccactcacgtatctaaagtatttctgactcaaatgaacgcaagaggtgtaaaagtcaaattagatttcgaaagaaggcctccttcgttttacaaacaattagataaagtagacctaaaaccatcttttcttaagtagatattggtagaagatatgcactaacatcatatgcttcttcctgtaattctccccatattggatcatgaggtggattattgataacatgtggaggaggttgaggtatagatggtacttgagatcctgatgatggatgttctggtagagtattatccattggatgagatgtgctatgtgatttatctgtcgatggatcttctggatgttgtgaaacttctagagtatccactggagatgtaacatgaggtttatctgttgacggagttggagattttggcattgtatcttcagaagtaacaacttcattatcatggacttttgtatctagagctagtacatcaacgccagaatctgtaatattgcatttggagaggtaacgatcgcgttctagttctcttttgtagaacttaactttttctttctccgcatctagctggtattccaacttcttcacattagaacgttctaattgcaactcgcgttcgcattgaactccgccacagtctttacgagcgatttcacgttccagatcgtgctcagccttcatgcgtctctccctctctctatcgaatttatcagaatagtctttctgaagacgatcgaattctacaaatttttccaataccttaatcgtttccatgcatctccgaagttctgcttcgagaaccgcgattctttttctctcgaaatcacagactgagtgacaatttccacttcctccattaccgcaatctctgagtttcctttctagatccgcgatttttatcaacatctcttctccgtgtctcttacaatcctctagtctacgatcgttgaaatatttttccaattccttttcaacctcaacaactttaacacgttgtctctcgagttctctcttgtagtagctatcatttttatctgattccctagcgcgtctgagatcttcgtgtaattgtgtcaactctcgacgtagacgcttaacctcagatctagcctcttcgtcaaagtacgtgcaatatccatgtgatccgttattatggcgtctacaatcggcgagatctcgtttcagtgattcaatctctttcttatacttgattatatcctcattagtaccgttgtgtgattcacagtactctagttgttgtttgagatctttaatacggttctttagcctatctatttcctcagaagatgatccattaccgttacgtctacactcattaagttgcttatccagatccatgattctatttctcagacgttccatctctttttttgtatcggcattatggtcattattacgtctgcaatcagttagctgcctttccagatccgtaattctagatttgagtctgttaatctctgtaatattgtttcctccattatccatgcaatcagacaacttgttctccaggtccttgatacgtgaacgtagtgcctctacttcctgtgtgttttcttgattcctcatgcattcattgagtttgttttctagatctctagtattccgtcgttcatcctctagttccctatgtgccacagagagattttgttgatatctagcgatttcggattccagactagtaactctattggtgtatgtcataatagttatattggccttatcgagatcctccttgtattggttgcattcggtgatgtctctacgaagtctagacagttcccgttcggcgtcacgacgtttgtcgatttcgactcggagatcttcatcacgttgctttagccacatacgactgagttcaagttctcgttgacatgatccatcaacctttccattcctaatagtatccagttccttttctagttctgcacgcatttcccgttccctatcaagagattctctcaattccttaatagtctttttatcaatttctgctaatgctgaacaattgttggatccaccacccatatcccttagttctttgatctcatttgttagttgttcgatcctttcatttttatatacagaatccctttccaaagtcctaattttaccgagtttatcactaagttctttattcatgtcattgagctttttcttggcttcttccaactctctcgtaaactcttctccaccatttccgcattcttcctcgcatttatctaaccattcagttagtttgttaatgacaagttgataatcagcaattgcaagcgccgaccgtacgatagtgatatcattatctgctgtattatatggcattggtttggcgttgtctggattatgacgtgtcgaatctccaccatttgaaggagattctccggagtcaatagattctacacctttagttcctatatccataccaccagacgtatgcgaatatttgtcatatatgtctacttccttatccatcaagtatctataatctggttctacttctgagtattcttttctaagagacacaacttcgggagtcaatagtagaactctatttctgtatctatcgatgctggaatcgatactcaagttaagaatagcaaacacatcatcttcatcatcggtatcttctgtaacaccatcatatgacatttcatgaagcctgacatactgataaatagaatcagatttagtattaaacagatccttatactttttagtaaagacatatgtgtattttagatctccagattttataatatgatcacatgccttaaatgtcagtgcttccattatatagtctggaacgctaataggtgtcgaaaaagatgctgggccatatgctatgttaataaatggctctgaatcactaattattagattatgattaatgttaaggaaaaggaaaaattcattatatagatacgcattagctttatatcttgtactaaacacactaaataatttattaatgtggtcaatatccagtaaaataattatggttgctggaacaccaacgaacatattaccacatccatacttactatgaatatcacatatcgtgttaaacaatcttgatagaagagatgttaattcgtcaggatcaatgagttgtaattcagcagcagcatatgtcataactgtaaaaagaacatactttcctgtggtgttaactgaagacaccagatcaacgccattattaaaaatagtgttatatgcatctttaataggttctccgttaacagttgaattctctagaattttgaaacacgttgttttcttatttgtgattagtgaattagtgatatcacgaagaatattacgaattacatttcttgtttttcttgagagaccggattcagaactcaactcatcgttccatagtttttctacctcagtggcgaaatctttggagtgcttggtacatttttcaataaggttcgtgacctccatttattataaaaaaattttattcaaaacttaactacaatcgggtaattataagatcgtagatctcccatgtggcggaatactaccatctatcgcatgtggatggacagtaggtaatggccatgggaacagtaatgattgtatatttatctttcttgctagtattactgcatattgtcccaatgtttcgatgtggtgttctaacctatcaactgccgctgtattacaacaatagtgtccgatggaattaagattatgatccaatgtgtttaatatatgattatcaagtcttatacgatccgcgtcttttttgacaggatcaggttcttctacaggaagaagtttcggcctcttatgatattcatgtctgggaaacggtggtctagggtgaggctccggtatcggagtgggttttggattataatcatcatcgtctatgacatcctcatcatcatcttcgacttcgatatttattttgctatcttgatgatgtcctgtatcagttgcattttcagcactcgactgaatattagcgcattcattgtctattattaccatatttctaaacccaaaatgtatgtgttgaacatcactactatcgtggatgagtcttatagcatgaattcgcttatcgttatcgggtttagcttctgtcaccttagcaattccttttttattaaactctacataatcataaccatttctattgtttgttctaatataaacgagtatagaatcattgctaaatttttcaatagtatcgaaaacagaatatcctaaaccatataatatatattcaggaacactcaaactaaatgtccaggattctcctaaatacgtaaactttaatagtgcgaaatcattcaaaaatctaccgcttatagatagatagtatatgaatgcgtatagtagtctacctatctctttattacgaaaaccggcattacgatcatatatgtcgtgatatacctgtgatccgtttacgttaaaccataaatacatgggtgatcatataaacatgaatttattcctaattctcagagatatagttaattgatcgtataatatttgcttacatgcatacttgatacgctcattaataagatttttatcattgctcgttatctcagaatcgtatatataaggagtaccatcgtgattcttaccagatattatacaaaatactatatataaaatatattgaccaatgttagtaatcatataaatgtttaacgttttaaattttgtattcaatgatccattatcatacgctagcatggtcttatgatattcattctttaaaatataatattgtgttagccattgcattggggctcctaatggagattttctattctcatccattttgggataggctttcataaagtccctaataacttcgtgaataatgtttctatgttttctactgatgcatgtatttgcttcgatttttttatcccatgtttcatctatcatagatttaaacgcagtaatgctcgcaacattaacatcgtgaaccgttggcacaattccgttccataaatttataatgttcgccatttatataactcattttttgaatatacttttaattaaacaaaagagttaagttcattcatatggacggcgtccagtctgtacatcaatctttttagccagagatatcatagccgctctcagagtttcagcgtgattttccaacctaaatagaacttcatcgttgcgtttacaacacttttcgatttgttcaaactttgttgttacattagtaatctttttttccaaattagttagccgttgtttgagagtttcctcattgtcgtctccatcggctttaacagttgcttcgtgtttatcctctggctttttagcagcctttgtagagaaaaattcagttgctggaattgcaagatcatcatctccggggaaaagagttccgtccatttaaagtacagattttagaaactgacactctgcgttatttatatttggtgcaacacatggattataaatatcgatgttaataacatcagaaaatgtaaagtctatacattgttgcatcgtgttaaattttctaatggatctagtattattgagtccaacttctgtctgaaatccaaatatagaagcggatacaaaaccgtttcctggataaaccacacatctccacttttgctttacatcagaaattgtgtcattgacatcttgaactctcctatctaatgctggtgtaccacctatagattttgaatattcgaatgctgcatgcgtagcattaaattccttaatattgccataattttcatatattgagtaaccctggataaaaagtaaacacactgcagccgtcgctaccacaataaaaaaaattgatagagagttcatttataatatattagaagctgacaaaatttttttacacgcatcagacaatgctttaataaatagttcaacatctacttttgtcatatcgaaccgatggtatgattctaacctagaattacatccgaaaaagttgactatgttcatagtcattaagtcattaacaaacaatattccagactctggattataagatgatactgtttcgtcacaatcacctaccttaatcatgtgattatgaatattggctattagagaaccttctaagaaatctataatatctttgaaacacgatttaaaatcaaaccacgaatatacttctacgaagaaagttagtttacccataggagagataactataaatggagatctagatacaaaatccggatctatgatagttttaatattattatattctctattaaatacctcaacatctaaaaatgttaattttgaaactatgtcttcgcttattaccgtacctgaactaaacgctataagctctattgtttgcgaactctttaaacgatattcttgaaatacatgtaacaaagtttcctttaactcggtcggtttatccaccatagttacagaatttgtatccttatctataatataataatcaaaatcgtataaagttatataattatcgcgttcagattgtgatcttttcaaatagactaaaaaccccatttctctagtaagtatcttatgtatatgtttgtaaaatatcttcatggtaggaatatgctctaccgcagttagccattcctcattgacagctgtagatgtattagacaaaactattccaatgtttaacaagggccattttacgagattattaaatccttgtttgataaatgtagccaatgagggttcgagttcaacgacgattgaattctcttcccgcggatactgcatgatgaactacgggatgttgttcgattgatttggaattctttttcgactttttgtttatattaaatattttaaagtttatagctgatagcaattcatgtactacggataatgtagatgagtattgtacatcgatatctttattattagataaatttatcaataaatgtgagaagtttgcctcgttaaggtcttccatttaaatattatataaacatttgtgtttgcatcttattcgtcttttgtggaatagtttttaactagtaaagctgtaattacatactttgtccgtaaaacataaatataaacaccagctcttatcaaccgttccaaaaagtcgacggcggacatttttaacatggaatctattttaaatacgcttagatttctagaaaaaacatcattttataattgtgacaatttaataactactgaaaagataaagattaaacataagggaatggcatttgtattttataagccaaagcattctaccgttgttaaatacttgtctggaggaggtatatatcatgatgaattggttgtattggggaaggtaacaattaatgatctaaagatgatgctattttacatggatttatcatatcatggagtaacacgtagcggagcaatttacaaattgggatcatccatagatagactttctctaaataggactattgttacaaaagttaataataattataattatgatacattttttgacgacgatgattgatcgctattgcacaattttgtttttttactttctaatatagtgtttaggttctttttcatatgtgaatattgatttactaaaatatctatgtttaacttttgttctataacgtccttatcagcggtatcggtacatatacgtaattcaccttcacaaaatacggagtcttcgataataatagccaatctattattggatctagccgtctgtatcatattcaacatatttaatatatcctttcgtttcccctttacaggcattgatcgtagcatattttccgcgtctgagatggaaatgttaaaactacaaaaatgcgtaatgttagcccgtcccaatattggtacgtgtctataagtttggcatagtagaataatagacgtgttcaaatgccttccaaagtttaagaattctattagagtattgcattttgatagtttatcacctacatcatcaaaaataagtaaaaagtgtgctgattttttatgattttgtgcgacagcaatacatttttctatgttacttttagttcgtatcagattatattctagagcttcctgactactaacgaaattaatatgatttggccaaatgtatccatcataatctggattataaacgggtgtaaacaagaatatatgtttatattttttaactagtgtagaaaacagagatagtaaatagatagtttttccagatccagatcctcccgttaaaaccattctaaacggcatttttaataaattttctcttgaaaactgtttttcttgaaaacaattcataattatatttacagttactaaattaatttgataataaatcaaaatatggaaaactaaggtcgttagtagggaggcgaacaaagaaggaatatcgtgatataaataatatttattatcatgatgacgccagaaaacgacgaagagcagacatctgtgttctccgctactgtttacggagacaaaattcagggaaaaaataaacgcaaacgcgcgattggtctatgtattagaatatctatggttatttcactactatctatgattaccatgtccgcgtttctcatagtgcgcctaaatcaatgcatgtctgctaacgaggttgctattactgactccgctgttgacgttgctgctacatcatctactcatagaaaggttgcgtctagcactacacaatatgatcgcaaagaaagctgtaatggtttatattaccagggttcttgttatatactacattcagactataagtcatttgaggatgctaaagcaaactgcactgtggaatcattaatactacccaataaatccgatgtcttggctacctggctagctgaatatgttgaggatacatggggatctgacggcaatccaattacaaaaactacatccgagtatcaagattctgatgtatcacgagaagttagaaagtatttttgtgttaaaataatgaactaatatttatttttgtacataaataaatgaaatcgcttaatagacaaactgtaagtaggtttaagaagttgtcggtgccggccgccataatgatgatactctcaaccattattagcggcataggaacatttctgcattacaaagaagaactgatgcctagtgcttgcgccaatggatggatacaatatgataaacattgttatctggataccaacattaaaatgtccacagataatgcagtttatcagtgtcgtaaattacgagctagattgcctagacctgatactagacatctgagagtattgtttagtattttttataaagagtattgggtaagtttaaaaaagaccaataataaatggttagatatgaataataataaagatgtagatattagtaaattaacaaattttaaacaactaaacggtactacggattctgaagcgtgttatatatacaagtctggaaaactgtctaaaacagtatgtaaaagtactcaatctgtactatgtgttaaaagattctacaagtaacgacaaaaatgaaataataataagtccttaacgaacgtcgccatggacgccgcgtttgttattactccaatgggtgtgttgactataacagatacattatatgaggatctcgatatctcaataatagactttataggaccatatattataggtaacataaaaactgtccaaatagatgtatgggatataaaatattccgacatgcaaaaatgctactttagctataagggtaaaatagttcctcaggattctaatgatttggctagattcaacatttatagcatttgtgcagcatacagatcaaaaaataccatcatcatagcatgcgactatgatatcatgttagatatagaaggtaaacatcagccattttatctattcccatctattgatgtttttaacgctacaatcatagaagcgtataatctgtatacagctggagattatcatctgatcatcaatccttcagatgatctgaaaatgaaattgttgtttaattcttcattctgcatatcagacggcaatggatggctcataattgatgggaaatgcaatagtaattttttatcataaaagttgtaaagtaaattaataaaacaacaaatattgaactagtagtacgtatattgagcaatcagaaatgatgctggtaccacttatcacggtgaccgtagttgcgggaacaatattagtatgttatatattatatatttgtaggaaaaagatatgtactgtctataatgacaacaaaattatcatgacaaaattaaaaaagataaagaattctaattccagcaaatctagtaaatcaactgatagcgaatcagactgggatgatcactgtagtgccatggaacaaaataatgacgtagataatatttctaggaatgagatattggatgatgatagcttcgctggtagtttaatatgggataacgaatcccatgtcatggcgcctagcacggaacatatttacgatagtgttgccggaagcacgctgctaataaatagcaatcgtaatgaacagacttcagaacactacgtaattaatgagacagagactgttgaagtacttaatgaagataccaaacagaatcctaactttcatccaatcctttcgtaaattataataaaaccagtattgtagcaagtcaaatccgtttattacagaactcaacaataaatttagtgagaataatccgtttagacgagtacatagcgatgattatcttaataagcaagaacaagaccaagaacaagatcgtgaacacgatgatatagaatcatcggttggcgtgattggtttccttttttataaaattgaagtaatatttagtattaatcgctgccgtcacgttgtacaaatggagatattccctgtactcagcatttctaaaattagcaattttattgctaataatgactgtagatattaatatagatgcagaacatcaaaaaattatatctgatgagatcaatagacagatggatgaaacggtacttcttaccaacatcttaagcgtagaagttgtaaacgacaatgagatgtaccatcttattcctcatagactatcgacgattatactctgtattagttctgtcggaggatgtgttatctctatagataatgacgtcaatgacaaaaatattctaacctttcccattgatcattgtaatcatatccccactgagtaaatgtgtcgtagttagcaagggtcctacgaccatattggttgttaaagcggatatatccagcaaacgactactatatgtaaacaatctgtcactgattaattatttgccgttgtctgtattcattattagacgagttaccgactatttggatagacacatatgcgatcagatatttgcgaataataagtggtattccattataaccatcgacaataagcagtttcctattccatcaaactgtataggtatgtcctctgccaagtacatacattctagcatcgcacaagatactttaatccatgtttgtaacctcgagcatccgttcgactcagtatacaaaaaatgtagtcgtgcaattctctacctatcaaggaacaaatattgtacggcagaattgataatataaatatgagaattagtatttctgtggattaatagatttctagtatgggatcattaatcatctctaaatacctcataaaacgaaaaaatgctgctacaaatgaaaaaaagctattatcaaatactgtacggaatggattcattcttttctctttttatgaaactctgttgtatatctactgataaaactggaagcaaaaaaatctgataggaagaacaaggattatatggaacacgattattataaaataacaatagttcctggttcctcttccacgtcgactagctcgtggtattatacacatgcctagtaatagtctctttgcgttgacggaaagtagactagaaataacaggctaaaatgttcagacaccataatagttcccaacccagataataacagagttccatcaacacattcctttaaactcaatcccaaacccaaaaccgttaaaatgtatccagccaattgatagtaaataattaggtgtacagcacatgataatttacacagtaaccaaaatgaaaacactttagtaattataagaaatatagacggtaatgttatcatcaacaatccgataatatgccggagagtaaacattgacggataaaacaaaaatgccccgcataactctatcatggcaatgacacaaccaaacacttgtaaaattcctaaattggtagaaaatacaacagatatcgatgtataagcgatttcgagaaataataagaataaagtaatgcccgtaaagataaacatcaacgttgtttggtaatcattaaaccaattagtatgacattgaactaatttcacagtagattttattccagtattgtcaccgcatgtatacgtacctggtaagatatctttatattccataatcaacgagacatcattatccgataacgaatgaagtctagcactagtatgccatttacttaatatagtcgtcttggaagttttattataagttaaaatatcatgattgtccaatttccatctaatatactttgtcggattgtctatagtacatggaataatgatggtatcattgcacgctgtgtactctatggtctttgtagttgttataacaaccaacgtatagaggtatatcaacgatattctaactcttaacatttttatttatttaaatgatacctttgttatttattttattctattttactaactgtatcgaatggcataagtttgaaacgagtgaagaaataatttctacttacttaatagatgatgtattatacacgggcgttaatggggcggtatatacattttcaaataatgaactaaacaaaactggtttaactaataacaataattatatcacaacatctataaaagtagaggatacattagtatgcggaaccaataacggaaaccccaaatgttggaaaatagacggttccgaagatccaaaatatagaggtagaggatatgctccttatcaaaatagtaaagtgacgataatcagtcataacgaatgtgtactatctgatataaacatatcaaaagaaggaattaaaagatggagaagatttgacggaccatgtggttatgatttatacacggcagataacgtgattccaaaagatggtgtgcgtggagcattcgttgataaagacggcacttatgacaaagtttacattcttttcactgatactatcgacacaaagagaattgttaaaattccgtatatagcacaaatgtgcttaaatgacgaaggtggtccatcatcattgtctagtcatagatggtcgacgtttctcaaggtcgaattagaatgtgatatcgacggaagaagttatagacaaattattcattctaaagctataaaaacagataatgatacgatactatatgtattctttgatagtccttattccaagtccgcattatgtacctattctatgaatgccattaaacactctttttctacgtcaaaattgggaggatatacaaagcaattgccgtctccagctcctggtatatgtctaccagctggaaaagttgttccacataccacgtttgacatcatagaacaatataatgagctagatgatattataaagcctttatctcaacctatcttcgaaggaccgtctggtgttaaatggttcgatataaaggagaaggaaaatgaacatcgggaatatagaatatacttcataaaagaaaatactatatattcgttcgatacaaaatctaaacaaactcgtagtgcacaagttgatgcgcgactattttcagtaatggtaacttcgaaaccgttatttatagcagatatagggataggagtaggaataccacgaatgaaaaaaatacttaaaatgtaatcttaatcgagtcaccacatgacaatgaacaaacctaagacagattatgctttatgcttgttgtgttgtaatatgtggtctgattatcggaattatttttacagcaacgctattaaaagttgtagaacgtaaattagttcatacaccatcaatagataagacgataaaagatgcatacattagagaagattgtctgactgactggataagctataataaatgtatccatttatctactgatcgaaaaacctggaaggaaggacgtaatatgcaaagctctaaatccaaattctgatctaattaagatagagactcccaaacgagttaagctttttaagacgccttagaagaggctattgggtaggagaatccgaaatattaaaccagacaaccacatataattttatagctaagaataccacaaagaatggaactaaaaacggaaatatatttgtagtacaactaatattcccccccccccccccccccccaaactgcattcgtggttacactatataatataataatacataaaactatgctacatttttatcataacactatttctgttagatggtttagaaaaaaaataaatatctccgtaccgttcttgtttttataaaaataacaattaacaattaacaaattttttctttaatattttacgtggttgaccattcttggtggtaaaataatctcttagtgttggaatggaatactgtttaatgtttccacattcatcgtatattttgacgtatgcagtcacatcgtttacacaatagtcagactgtagttctatcatgcttcctacattagaaggaggaacagttttaaagtctcttggttttaatctattgccgtttttcatgaaatcctttgttttatccacttcacattttaaataaatgtccactatacattcttctgttaattttactagatcgtcatgggtcatagaatttataggttccgtagtccatggatccaaactagcaaacttcgcgtatacggtatctcgattagtgtatacaccaactgtatgaaaattaagaaaacagtttaatagatcgacagaaatatttaatcctccgtttgatacagatgcaccatatttatggatttcggattcacacgttgtttgtctgaggggttcgtctagcgttgcgtctacataaacttcgattccaatatattctttattgtcagaattacatatagatgtatcaccattatacactgtttctgaagttgttcgaacactaaatggtaggcacatcaaaatagtaaataataacaagtacatttctgcaatattgtatcgtacttggaaaattagtgttcgagtgagttggattatgtgagatttggattgtctatctttattttatgttttatattagaattgactgatatgacaagtttattccaatagattcttattaaaaacatatataataaataacaatggcggccgaatggcataaaattatcgaggatgtttcaaaaaataataagtttgaggatgccgccatcgtcgattacaagactaaaaagaatgttctagcagccattcctaacagaacatttgcaaagatcattccaggtgaagtaattgctctaatcactaatcgtaatattctaaaacctcgtataggtcaaaaattttttattgtatacactaactctctgatggatgagaacacatataccatggagttgcttactggatacgcaccagtatctccgattgttatagcgagaacacacaccgcactcatctttttgatgggtaagcctacgacatccagacgtgaagtttatagaacgtgcagagattatgccactaatgtgcgagcaactggtaattaatatgaaaaaataacattaattattaacgttaatttttaaatgatgaggaaatggagcatatccatattgactatatcaataattccggtattatcatacacctcatcgatttttagattacatttagacaatgaattggagttatgttatgggaaattacaatttgataagttgagtaatgtaaatataaaatacattcctgagtatattccatacagatataattttattaatagcacattaactgtggacgaagccaagaagtataatgttgtttttacacgtagttcatttttaaaatatagatacgctagtaatttagatactggtttggttgtcgcgttagccgtacacttaaaatataatgatgtgcgatgtttagtaaatgtatcatgtttcattaaaaatttgatgacacatacatctactatattaacatcaaagcatgtgacttattcgttgcgtcgatccaggtgtaatattataataggatacgattctatcatatggtataaagataatatatcagatcattataatgaagaattatattataacggtatctatgactttactgcaatatgcatgttaatagcatctacagtgatagtattagtatactttttaaaaagaataaaaatgaactatttgattactattattaaaaatggataaaatcaaaattacagttgattcaaaaatcggtagcgtggttaccatatcttacaacttggaaaagataacaattgacgtcgtccccaaaaaaagaaaaggagatagtgattgtcactgaagaagtggtaaaagatattatcgatattgttgatgacatggatatagagagtgtatcatgtgatctataaaaataggtattaatcaatactttttatttacggtactgcaccgattactttatactttttatttacggtactcttatgccatgacctacattattccctattttaaaaaaatattattctaattcttctagccatttcctagttcgttcaaatgctacatcgacgtcaaagataggcgagtagttgaaatctagttctgccttgttggtacgtacctcgaaggcggtattggatatcttcaacgtatatttgtttaatagagatgatttcctaaatagaattctcttaatatcattcttacatgcgtgcgtttttagtacccatcttggaaccctagatccttgttctattcccagtggtttcatcaatagaagattaaacatgtcatacgagcacgatggagagttatcgtagcaaaagtaagcatttcctttaatctcagatcccggatactggatatattttgcagccaacacgtgcatccatgcaacatttcctacatatacccggctatgcaccgcgccatcatcgactgtacgatacataatgttaccatgttgcttacattgcttgtaaaagactttcatcaatttgtctccttctccgtaaatttcagtgggtcttaggcaacaagtatacaattttgctccattcatgattacggaattattggctttcataaccagttgctcagccatacgtttactttttgcgtaaacatgtcctggtgatatatcataaagggtatgctcatggccgatgaatggatcaccgtgtttatttggtcctattgcttccatgctactagtatagatcaaatacttgattcctaggtccacacaagctgccaatatagtctgtgttccataatagtttactttcatgatttcattatcggtgtattttccaaatacatccactagggcggccgtatgaataatcagatttaccccatctagtgcctctctcaccttatcaaagtcgtttatatcacattgtatgtaatttataactttaaccttcgatgtgagcggttgtggatcttcttcgacatcgatgactctgatttcctgaacatcatctgcactaattagaagtttgacgatatacctgcctagaaatccggcaccaccagtaaccgcgtacacggccattgctcgccactcgtaatagcagactacttattctattttactaaataatggctgtttgtataatagaccacgataatatcagaggagttatttactttgaaccagtccatggaaaagataaagttttaggatcagttattggattaaaatccggaacgtatagtttgataattcatcgttacggagatattagtcgaggatgtgattccatagacagtccagaaatatttatcggtaacatctttgtaaacagatatggtgtagcatatgtttatttagatacagatgtaaatatatctacaattattggaaaggcgttatctatttcaaaaaatgatcagagattagcgtgtggagtcattggtatttctttcataaatgaaaagataatacattttcttacaattaacgagaatggcgtttgatatatcagttaatgcgtctaaaacaataaatgcattagtttacttttctactcagcaaaataaattagtcatacgtaatgaagttaatgatacacaatacactgttgaatttgatagggacaaagtagttgacacgtttatttcatataatagacatactgactccatagagataagaggggtgcttccagaggaaactaatattggttgcgcggttaatacgccggttagtatgacttacttgtataataagtatagttttaaactgattttagcagaatatataagacacagaaatactatatccggcaatatttattcggcattgatgacactagatgatttggctattaaacagtatggagacattgatctattatttaatgagaaacttaaagtagactccgattcgggactatttgactttgtcaactttgtaaaggatatgatatgttgtgattctagaatagtagtagctctatctagtctagtatctaaacattgggaattgacaaataaaaagtataggtgtatggcattagccgaacatatagctgatagtattccaatatctgagctatctagactacgatacaatctatgtaagtatctacgcggacacactgagagcatagaggatgaatttgattattttgaagacgatgattcgtctacatgttctgccgtaaccgacagggaaacggatgtataatttttttatagcgtgaaggatatgataaaaatataattattgtatccattccgattccaatcacattatatgattctgtaaaaaaattatactgtaacgcaatgaagtagtctcatagatgtatagaggtcagatactggtttgataaactttttattccacatgagtatgtttgactttatggttagacccgcatactttaacaaatcactgaaaattggagttaggtattgacctctcagaatcagttgccgttctggaacattaaatgtattttttatgatatactccagcgcatttatgttggcatacaacaagtcattactaatggaatattccaagagttttagttgtctagtatttaacaagagaagagatttcaacagactgtttatgaactcgaatgtcgcctcattgtcgcttatattgatgatgtcgaattctcccaatatcatcgccgatgagtagctcatcttgttatcgggatccaagttttctaaagatgtcattaaaccctcgatcatgaatggatttatcatcatcgtttttatgttggacatgagcttagtccgtttgtccacatctatagaagatgatttctgaattatttcatatatctctctctttaacaccaggaacttgtcaggatggtctactttaatatgttctcgtctaagagatgaaaatctttggatggtcgcatgtgacttttctctaaaggatgatgttgcacaagatcctctcttaaatgaatccatcttatccttggacaagatggacagtctattttccttagatggtttgatatttttattacccatgactataaaggtagacctaatcgtctcggatgacctatatatttattttcagttttattatacgcataaattgtaaaaaatatgttaggtttacgaaaatgtctcgtggggcattaatcgtttttgaaggattggacaaatctggaaaaacaacacaatgtatgaacatcatggaatcaataccttcaaacacaataaaataccttaactttcctcagagatccactgtcactggaaaaatgatagatgactatctaactcgtaaaaaaacctataatgatcatatagttaatctattattttgtgcaaatagatgggagtttgcatcttttatacaagaacaactagaacagggaattactttaatagttgatagatacgcgttctctggagtagcgtatgccgccgctaaaggcgcgccaatgactctgagtaagagttatgaatctggattgcctaaacccgacttagttatattcttggaatctggtagcaaagaaattaatagaaacgtcggcgaggaaatttatgaagatgttgaattccaacaaaaggtattacaagaatataaaaaaatgattgaagaaggagatattcattggcaaattatttcttctgaattcgaggaagatgtaaagaaggagttgatcaagaatatagttatagaggctatgcacacggttactggaccagtggggcaactgtggatgtaataaagtgaaattacattttttataaatagatgttagtacagtgttataaatggatgaagcatattactctggcaacttggaatcagtactcggatacgtgtacgatatgcataccgaactcgtatcaatatctcaattagttattgccaagatagaaactatagataatgatatattaaacaaggacattgtaaattttatcatgtgtagatcaaacttggataatccatttatctctttcctagatactgtatatactattatagatcaagagaactatcagactgagttgattaattcattagacgacaatgaaattatcgattgtatagttaacaagtttatgagcttttataaggataacctagaaaatatagtagagatgctatcattactctaaaatatataatgaataacccagattttaaaactacgtatgccgaagtactcggttccagaatagccgatatagatattaaacaagtgatacgtaagaatatactacaattgtctaatgatatccgcgaacgatatttgtgaaaaatattaaaaaaagatactttttttattaaatgacgtcgcttcgcgaatttagaaaattatgctgtgatatatatcacgcatcaggatataaagaaaaatctaaattaatcagagactttataacagatagagatgataccgatacatatttgatcattaagttattgcttcccggattagacgatagaatgtataacatgaacgataaacaaattataaaattatatagtatagtatttaaacaatctcaggaagatatgctacaagatttaggatacggatatataggagacactattaggactttcttcaaagagaacacagaaatccgtccacgagataaaagcattttaactttagaagaagtggatagttttttaactacgttatcatccgtaactaaagaatcgcatcaaataaaattattgactgatatagcatctgtttgtacatgtaatgatttaaaatgtgtagtcatgcttattgataaagatctaaaaattaaagcgggtcctcggtacgtacttaacgctattagtcctcatgcctatgatgtttttagaaaatctaataacttgaaagagataatagaaaatgcggctaaacaaaatctagactctatatctatttctgttatgactccaattaatcccatgttagcggaatcgtgtgattctgtcaataaggcgtttaaaaaatttccatcaggaatgtttgcggaagtcaaatacgatggtgaaagagtacaagttcataaaaaaaataacgagtttgccttctttagtagaaacatgaaaccagtactctctcataaagtggattatctcaaagaatacataccgaaagcatttaaaaaagctacgtctatcgtattggattctgaaattgttcttgtagacgaacataatgtaccgctaccgtttggaagtttaggtatacacaaaaagaaagaatataaaaactctaacatgtgtttgttcgtgtttgactgtttgcactttgatggattcgatatgacggacattccattgtacgaacgaagatcttttctcaaagatgttatggtcgaaatacccaatagaatagtattctcagagttgactaatattagtaacgagtctcagttaaccgatgtattggatgatgcactaacgagaaaattagaaggattggtcttaaaagatattaatggagtatacgaaccgggaaagagaagatggttaaaaataaagcgagactatttgaacgagggttccatggcagattctgccgatttagtagtactaggtgcttactatggtaaaggagcaaagggtggtatcatggcagtctttctaatgggttgttacgacgatgaatccggtaaatggaagacggtaactaaatgttccggccacgatgataatacgttaagggttttacaagaccaattaaagatggttaaaattaacaaggatcccaaaaaaattccagtgtggttggtagttaataaaatctatattcccgattttgtagtagaggatccaaaacaatctcagatatgggaaatttcaggagcagagtttacgtcttcaaagtcacatacagcaaatggaatatcgattagatttcctagatttactaggattagagaagataaaacgtggaaagaatctactcatctaaacgatttagtaaacttgactaaatcttaatagttacatacaaactgaaaattaaaataacactatttagttggtggtcgccatggatggcgttattgtatactgtctaaacgcgttagtaaaacatggcgaggaaataaatcatataaaaaatgatttcatgattaaaccatgttgtgaaagagtttgtgaaaaagtcaagaacgttcacatcgacggacaatctaaaaacaatacagtgattgcagatttgccatatctggataatgctgtatcggatgtatgcaaatcaatatataaaaagaatgtatcaagaatatccagatttgctaatttgataaagataggcgacgatgacaagactcctactggtgtatataattattttaaacctaaagatgccattcctgttattatatccataggaaaggataaagatgtttgtgaactattaatcgcatccgataaagcgtgtgcgtgcatagagttaaattcatataaagtagccattcttcccatgaatgtttccttctttaccaaaggaaatgcgtcattgattattctcctgtttgacttctctatcgacgcggcacctctcttaagaagtgtaaccgataataatgttgttatatctagacacaaacgtctacatgacgagcttccgagttccaattggttcaagttttacataaatatacagtccgactattgttctatattatatatggtagttgatggatctgtgatgtatgcaatagctgataatagaactcacgcaattattagcaaaaatatattagacaatactacgattaacgatgagtgtagatgctgttattttgaaccacagattaagattctcgatagagatgagatgctcaatggatcatcgtgtgatatgaacagacattgtattatgatgaatttacctgatgtaggcgaatttggatctagtatattggggaaatatgtacctgacatgattaagattgctctttcggtggctggtaatttaataagaaatcgagactacattcccgggagacgaggctataactactacgtttacggtatagcatctagataattttttttaagcacaaaataaaaaacataattttaaaccaatctatttcatactattttgtgcgatcaccatggacataaagatagatattagtatttctggtgataaatttacggtgactactagtagggaaaatgaagaaaaaaactactgatgttatcaaacctgattatcttgagtacgatgacttgttagatagagatgagatgtctactattctagaggaatattttatgtacagaggtctattaggcttcagaataaaatatggacgactctttaacgaaattagaaaattcgacaatgatgcggaagaacaattcggtactatagaagaactcaagcagaaacttagattaaattctgaagagggagccgataactttatagattatataaaggtacaaaacgacaggatatcgtcaaacttactgtgtacgattgcatatctatgataggattgtgtgcgtgtgtggtagatgtttggagaaaggagaaactgttttctagatggaaatattgtttacgagcaattaaactgtttattgatgatcacatgcttgataagataaaatctatactgtagaatagactagtgtatgcggaaatgtcatagaaagttaagttaatgagagcaaaaaattataatgttgtattctaatcccatatttattatttttttctgtaatagttagaaaaatacatttgatggtctatctaccagattattatgtgttataaggtactttttctcataataaactagagatgcgtaagatagtgtttttcaaaactataaatctaaaattgatggatgtgatatacagctattaatttcgaaaatatattttaatctgataactttaaacatggatttttgatggtggtttaaagtttaaaaaaatattttgttattgtagtatatgataatatcaaaaagatggatataaagaatttgctgactgtaagtactatttttacattactacattggctacggcagatatacctacttcgtcactgccacacgctccggtaaacgggtcatgtgacgagggagaatatcttgataaaggcataatcaatgttgtaatcagtgtccacctggagaatttgccaaggtcagatgtagtggcagtgataacacaaaatgtgaacgctgcctacctcatacatataccacaatccccaattattctaaatggatgtcatcaatgtagaaaatgcccaacaggatcatttgataaggtaaagtgtaccggaacacataacagtaaatgttcgtgtcttcctggttggtattgcgctactgattcttcacagactgaagattgtcgagattgtataccaaaaaggagatgtccgtgcggatattttggtggaatagatgaacaaggaaatcctatttgtaaatcgtgatgtattggtgaacattgcgactacctacataattatagagttggtccttttcctccatgtaaactatctaaatgtaattaattatgatcttgatataatatgattatcatgttaccatacattatatagctactttggtagtgtattattcagtatgaagacatattaataattacttatctttgaagatcttgttataatcataaatataaaaataaaaatacttatggggcatagtaactcataattgctgacacgataaattcgtaataatctgttttgttcaaatttttataaggaatctaggcataaaaataaaaacataatttataatacacttacaacacccatcatgaataacagcagtgaattaattgctgcgattaatggatttagaaatagtggacgattttgtgatattaatatagttattaatgatgaaaggataaatgctcatagactcatcctatctggagcatccgaatatttttccattctattttctagtgattttatcgattctaatgaatacgaagttaatctaagtcatttagattatcaaagtgtgaacgatttgatcgattacatttatgggatacctttgagcctaactaacgatagcgtgaaatatattctttcaactgctgattttttacaaattggatctgctattacggagtgtgaaaattacatacttaaaaatctctgttctagaaactgtatcgatttctacatatacgctgataaatataataacaagaaaatagaaacagcgtcgtttaacacaatattacgaaatattttgagactcattaacgatgaaaactttaaatacttgacagaggaatcaatgataaaaattttaagcgatgatatgttaaatataaaaaatgaggatttcgcaccactaattctcattaaatggttagagagtacacaacaaccatgcaccgtcgagttacttagatgcctcagaatatcattgctttccccacaagttataaaatcactttatagtcatcgactggttagttcaatctacgaatgtataacattcttaaacaatatagcattcttggatgaatcatttcctagatacaatagcatcgagttgatatctatcggtataagtaattcacgtgataagatttccataaactgctacaatcgtaaaaaaaatacatgggaaatgatatcttcacgtggatataggtgtagtttcgcagtggctgtcatggataatattatctatatgatgggtggatacgatcagtccccgtatagaagttcaaaggttatagcatacaatacatgtactaattcttggatatatgatataccagagctaaaatatccgcgttctaattgcggaggagttgtcgatgacgaatacatttattgtataggtggcatacgcgatcaggattcatcgttgatatctgatattgatagatggaagccatcaaaaccatattggcagacgtatgctaaaatgcgagagccaaaatgtgatatgggggttgcgatgttaaacggattaatatatgtcataggtggagtcgttaaaggtggcacatgtaccgacacactagagagtttatcagaagatggatggatgatgcatcgacgccttccaataaaaatgtccaatatgtcgacgattgttcatgctggaaagatttatatatctggaggttacaccaatagtagtatagttaatgaaatatctaatctagtccttagctataatccgatatatgatgaatggaccaaattatcatcattaaatattcctagaattaatcctgctctatggtcagtgcataataaattatatgtaggaggaatatccgatgatgttcaaactaatacatctgaaacatacgacaaagaaaaagattgttggacattggataatggtcacgtgttaccatacaattatataatgtataaatgcgaaccgattaaacataaatatccattggaaaaaatacagtacacgaatgattttctaaagtgtttggagagttttataggtagttgataaaacaaaatacataattttgtaaaaataaatcactttttatactaatatggcacgattgtcaatacttttgttactaatatcattagtatacgctacaccttatcctcagacacagatatctaaaaaaataggtgatgatgcaactatatcatgtagtcgaaataatacaactgactacgttgttatgagtgcttggtataaggagcccaattccattattctcttagctgccaaaagcgacgtcttgtattttgataattataccaaggataaaatatcttacgattctccatacgatgatctagttacaactatcacaattaaatcattgactgctggagatgccggtacttatgtatgtgcattctttatgacatcgactacaaatgacactgataaagtagattatgaagactactctacagagttgattgtaaatacagatagtgaatcgactatagacataatactatctggatctacacattcaccggaaactagttctgagaaacctgattatatagataattctaattgctcgtcggtattcgaaatcgcgactccggaaccaattactgataaagaagatcatacagtcacagacactgttgtatacactacagtaagtacatcatctggagttgttactactaaatcaaccaccgatgatgcggatctttatgatacgtacaatgataatgaatcatctactgtgttaccaacaactgtagaaagcatcacgaaatctataggtaagtatagtactaaagactttgcagaaatatttggtatcaccgcattaattatattgtctgccgtagcagttttctgtatcacatattatatatgtaataaacggtcacgtaaatacaaaacagagaacaaagtctagatttttgacttacataaatgtctgggatagtaaaatctatcatattgagcggaccatctggttcaggaaagacagccatagccaaaagactgttaaaagactatggaaatatatttggatttgtggtgtcccataccactagatttcctcgtcctatggaacgagaaggtgtcgattaccattacgttaacagagaggccatctggaagggaatagccgctggaaactttctataacatactgagtttttaggaaatatttacggaacttctaaaacagctgtgaatacagcggctattaataatcgtatttgtgtgatggatttaaacatcgacggtgttagaagtcttaaaaatacttacctaatgccttactcggtgtatataagacctacctctcttaaaatggttgagaccaagcttcgtcgtagaaacactgaagcggacgatgagattcatcgtcgtgcgatgttggcaaaacggatatggatgaggccaacgaagcagttctattcgacactattattattgaagatgatgtgaatttagcatatagtaagttaattcagatactacaggaccgtattagaatgtattttaacactaattaagatataatacttgactgacttaaaacttgataattaataatataattcgtttttatatgtgactatttcaacatctaatgtattagttaaatattaaacttaccacataaaacttaaaatttaaaatgatatttcattgacggatagatcacacattatgaactttcaaggacttgtgttaactgacaattgcaaaaatcaatgggtcgttggaccattaataggaaaaggtggattcggtagtatttatactactaatgacaataattatgtagtaaaaatagagcccaaagctaacggatcattatttaccgaacaggcattttatactagagtacttaaaccatccgttatcgaagaatggaaaaaatctcacaatataaagcacgtaggtcttatcacgtgcacggcatttggtctatacaaatccattaatgtggaatatcgattcttggtaattaatagattaggtgcagatctagatgcggtgatcagagccaataataatagactaccaaaaaggtcggtgatgttgatcggaatcgaaatcttaaataccatacaatttatgcacgagcaaggatattctcacggagatattaaagcgagcaatatagtcttggatcagatggataagaataaattatatctagtggattacggattggtttctaaattcatgtctaatggtgaacatgttccatttataagaaatccaaataaaatggataacggtactctagaatttacacctatagattcgcataaaggatacgttgtatcgagacgtggagatctagaaacacttggatattgtatgattagatggttgggaggtatcctgccatggactaagatgtctgaaacaaagaattgtgcattagtaagtgccacaaaacagaaatatgtgaacaatactgcgactttgttaatgaccagtttgcaatacgcacctaaagaattgctacaatatattactatggtaaactctttgacatattttgaggaacccaattacgacgagtttcggcgcgtattaatgaatggagttatgtaaaatttttgttgataaaaaattaaaaaataacttagttatatcactctcgcgagtgcaaccgaaaacatggcgatgttttacacacacgctttcggtgggtacgatgagaaccttcatgcatttcctggaatatcatcgacggtcgccaatgatgtcaggaaatattctgttgtgtcagtttataataaaaagtataagattgtaaaaaacaaatatatgtggtgttacagtcaggtgaacaagagatatattggagcactgctgcctatgtttgagtgcaatgaatatctacaaattggagatccaatccatgatcaagaaggaaatcaaatctctatcatcacatatcgccacaaaaactactatgctctaagcggaatcgggtacgagagtctagacttgtgtttggaaggagtagggattcatcatcacgtacttgaaacaggaaacgctgtatatggaaaagttcaacatgattattctactatcaaagagaaggccaaagaaatgagtgcacttagtccaggacctataattgattaccacgtctggataggagattgtatctgtcaagttactgctgtggacgtacatggaaaggaaattatgagaatgagattcaaaaaaggtgcggtgctacagatcccaaatctggtaaaagttaaacttggggagaatgatacagaaaatctttccactgccatatcagctctcctgaattccggcggtggcacaatcgaggtaacatctaaggaagaacgtgtggattatgtactcatgaaacgtttggaatctatacatcatctgtggtctgtagtgtatgatcatcttaatgttgtgaatggcaaagaacgctgttatgtgcatatgcattcatctaatcaacatcctataccgagtactgtaaaaacaaatttgtacatgaagactatgggatcatgtcttcaaatggactccatggaagctctagagtatcttagtgaactgaaggaatcaggtggacggagtcccagaccagaattgcagaaatttgaatatccagatggagtggaagacactgaatcaattgagagattggcagaggagttcttcaatagatcagaacttcaggctggtgaatcagtcaaatttggtaattctattaatgttaaacatacatctgtttcagctaagcaactaagaacacgtatacggcagcagcttccttctatactctcatcttttgccaacacagagggtggatatttgttcattggagttgataataatacacacaaagtaattggattcacggtgggtcacgactacctcagactggtagagaatgatatagaaaagcatatcaaaagacttcgtgttgtgcatttctgtgagaagaaagaggacatcaagtacgcgtgtcgattcatcaaggtatataaacctggggatgagactacctcgacatacatgtgtgctatcaaagtggaaagatgctgttgtgctgtgtttgcagattggccagaatcatggtatatggatactaatggtatcaagaagtattctccagatgaatgggtgtcatatataaaagtttaattaatgtaactatagagaaaataataggttgtatcatatagacaataactaacaattaattagtaactgttatctctttttaactaactaactaactaactatatacctattaataatacatcgtagttatagttcttaacatctattaatcattgattcgcttctttaattttttataaactaacattgttaattgaaaagggataacatgttacagaatataaattatatatggatttttttaaaaaggaaatacttgactggagtatatatttatctcttcattatatagcacgcgcgtgttccaattcttccacatcccatataatacaggattataatcttgttcgaacatacgagaaagtggataaaaaaatagttgattttttatctaggtggccaaatttattccatgtttcagaatatggggaaaatattctacatatttattctatggatgatgctaatgcgaatattataattttttttctagatagagtattaaatattaataagaaccgcgggtcatttatacataatctcgggttatcatccattaatataaaagaatatatatatcaatatcaattagttaataatgatcatctagataataggataagactaatgcttgaaaatggacgtagatcaagacattttttgtcctatatattagatacagttaatatctatatatgtattttaataaatcatggattttacatagatgctgaagacagttacggttgtacattattacatagatgtatatatcactataagaaatcagaatcacacaatgaattaattaagatgttgttaaataatggatcagatgtagataaaaaagatacgtacggaaacacaccgtttatcctattatgtaaacacgatatcgacaacgcggaattgtttgagatatgtttagagaatgctaatatagactctatggactttaatggatatacacctcttcattatgtctcgtgtcgcaataaatatgattttgtaaagtcattaatttctaaaggagcaaatgttaatgcgcgtaataaattcggaactactccattttattgtggaattatacacggtatctctcttataaagctatatttggaattagacatagcgttagaaatagataatgaacatatagttcgtcatttaataatttttgatgctattgaagctttggattatctattatccaaaggagttattgatattaactatcgtactatatacaacgaaacatctatttatgacgccgtcagttataatgcgtataatacgttggtctatctattaaacagaaatggtgattttgagacgattactactagtggatgtacatgtatttcggaagcagtcgcgaacaacaacaaaataataatggaagtactattgtctaaacgaccatctttgaaaattatgatacagtctatgatagcaattactaaacataaacaacataatgcagatttattgaaaatgtgtataaaatatactgcgtgtatgaccgattatgatactcttatagatgtacaatcgctacagcaatataaatggtatattttaaaatgtttcgatgaaatagatatcatgaagagatgttatataaaaaataaaactgtattccaattagttttttgtatcaaagacattaatactttaatgagatacggtagacatccttctttcgtgaaatgcgctagtctcgacgtatacggaagtcgtgtacgtaatatcatagcatctattagatatcgtcagagattaattagtctattatccaagaagctggatgcgggagataaatggtcgtgttttcctaacgaaataaaatataaaatattggaaaactttaacgataacgaactgtccacatatctaaaaaatcttataaacactattaaaatataaaatctaagtaggataaaatcacactacattattgtttccttttagtactcgacagtgtatactatttttaacactcataaataaaaatgaaaacgatttccgttgttacgttgttatgcgtactaccggctgttgtttattcaacatgtactgtacccactatgaataacgctaaattaacgtctaccgaaacatcgtttaatgataaacataaagttacgtttacatgtgatcagggatatcattctttggatccaaacgctgtctgtgaaacagataaatggaaatacgaaaatccatgcaagaaaatgtgcacagtttctgattatgtctctgaactatatgataagccattatacgaagtgaattccaccatgacactacgttgcaacagcgaaacaaaatattttcgttgcgaagaaaaaaatggaaatacttcttggaatgatactgttacgtgtcctaatgcggaatgtcaacctcttcgattagaacacggatcgtgtcaaccagttaaagaaaaatactcatttggggaatatatgactatcaactgtgatgttggatatgaggttattggtgcttcgtacataagttgtacagctaattcttggaatgttattccatcatgtcaacaaaaatgtgatataccgtctctatctaatggattaatttccggatctacattttctatcggtggcgttatacatcttagttgtaaaagtggttttacactaacggggtctccatcatccacatgtattgacggtaaatggaatcccatactcccgacatgtgtacgatctaacgaagaatttgatccgatagatgatgatcccgatgacgagacagatctgagcaagatctcgaaagacgttgtacaatatgaacaagaaatagaatcgttagaagcaacttatcatataatcatagtagcgttgacaattatgggtgttatatttttaatctccattatagtattagtttgttcctgtgacaaaactaatgaccaatataagttccataaattgctgccgtgaatatgaatacgttaaaaattaatgaataattaataattaataattaataattaattaattaataattaataattaataataaataataaataataaataataaataacgaacaagtatcaaaagattaaagaattgctagaatcaattgagatgtcttcttcagtggatgttgatatctacgatgccgttagagcatttttactcaggcactattgtgacaagagatttattgtgtatggaagaagtaacgccatattacataatatatacaggctatttacaagacgcgctattataccgttcgatgatgtagtacgtactatgccaaatgaatcacgtgttaaacaatgggtgatcgatacacttaatgatataatgacgaaggaacacgatgtttctgtaagcgtcagcaccggaatactattcatggaaatgtttttcgattacaataaaaataattccaaaaatagtatcaacaatcaactaatgtatgatataattaatagcgtatctataattctagctaatgagagatatagaagcgcttttaacgacgatggtatatacatccgtagaactatgattgacaagttgtacgaatacgcatctctaactactattggtatgattactggaggtatttgttattatctgttgatgcatctagttagtttgtataaataattatttcaatatactagttaaaattttaagatttttaaatgtataaaaaactaataacgtttttatttgtaataggtgcagtagcatcttattcgaataatgagtacactccgtttaataaacttagtgtaaaactgtatatagatggagtagataatatagaaaattcatatactgataataatgaattggtgttaaattttaaagagtacacaatttctattattacagagtcatgcgacgtcggatttgattccatagatatagatgttataaacgactataaaattcttgatatgtataccattgactcgtctaccattcaacgcagaggtcacacatgcaaaatatctaccaaattatcatgccattatgataagcacccttatattcacaaatatgagggtgatgagcgacaatattctattactgcagagggaaaatgctataaaggaataaaatatgaaataagtatgatgcacgatgatacgctattgagaaaacatactcttaaaattggatctacttatatattcgatcgccatggacatagtaatacatattattcaaaatatgatttttaaaaatttaaaatatattatcccttcagtgaccgtagtcaaataacaaacaacaccatgagagctataattctcacagttttgttcattaatagtataaatgctacaataactagttataagtttgaatccgtcaattttgattccaaaattgaatggactgggaatggtctatacaatatatcccttagaaattatggaataaagacgtggcaaacgatgtatacaaatgtaccagagggaacatacgacatatccggatttccaaataatgatttcgtatctttctgggttaaatttgaacaaggcgattataaagtggacaagtattgtacgggactatgcatcgaagtaaaaattggaccaccgactgtaacattgactgaatacgacgaccatatcaatttgtacatcgagcatccgtatgccactagaggtagcaagaagattcctatttataaacgcaatgacatgtgtgatatctacttgttgtatacggctaacttcacattcggagactctgaagaaccagtaatatatgatattgatgactacgattgtacgtctacaggttgcagtatagactttgccacaacagaaaaagtgtgtgttatggcacagggagccacagaagggcttcttgataaaattacgccatggagttcggaagtatgtctgacacctaaaaagaatgtatatacatgcgcaattagatccaaagaagatgttcccaatttcaaggaaaaaatgaccagagttatcaagagaaaatttaataaacagtcacactcgtatttgaccaaatttctcggtagtacatcaaatgatattacaacttttcttagcatgcttgactaaatattcataatgaactctctaaactatttttatcaaaaaataaaacaatcactagtattaattttgataacgtagcataatcaacataacctcatcatctattaactgataacggttagttataatagggataaaggattaatgattatttctaaacatggttcggagcttgaaacagaattcatgctctcccttaaaacggatatcgttgataaattcgaaacagtatatttaaacaaaaatatatatcattggaggcgttaaacagaatggagaatcgtctgatcaaatattgagcgtcgatctatcgacaaaaagattaacaatagagccatctcttaacgataaaagaataggagccgctgcagcagtcataaatggacgcatttatgttattggtggacgagatggatcaaattatctaaacactgtagaaagttggaaacctattgataacaagtggagatacgaaacaccgataaattataaaagaagcagtgattccgctgtttcagttaataatactattttcgtaactggtggattatccataaataattccaataatacaattgtgattaataacatggaaaaacttaaacttaacgtttatgaagacaaacaaacaatggtcgattatagaaatgcctatggctagggtatatcacggtatcgactcgacatttggaatgttatattttgccggaggtctatccgttaccgaacaatatggtaatttagagaaaaacaacgagatatcttgttacaatcctagaacgaataagtggtttgatatttcatatactaattataagagatccgtatcatcattgtgtaaactaaataacgtcttctatgtatttagtaaggacattggatatgtggaaaagtatgatggtgcatggaagttagacatgatagtctcccagctataaaggcattttccacttctccttattgattgaaaatgaaaatatacatagttttttacgcatagcagtatctcaccctatagttttattgcttctaacatggatacagatgttacagatacagatacagatacagatacagatacagatacagatgttacaaatgtagaagatatcatgaatgaaatagatagagagaaagaagaaatactaaaaaatgtagaaatggaaaataataaaaatattaacaagaatcatcccagcaaatatattagagaagcgctcgttattaataccagtagtaatagtgattccattgataaagaagttatagaatgtattagtcaggatgtaggaatatagatcatatatactaatttttataatcgatacaaaacataaaaacaactcgttattacatagcaggcatggaatccttcaagtattgttttgataacgatggcaataaatggattattggaaacactttatattctggtaattcgatactctataaggtcagaaaaaatttcactagttcgttctacaattacgtaatgaagatagatcacaaatcacacaggccattattgtctgaaatacggttctatatatctgtattggatcctttgactatcgacaactggaaaagggaacgcggtataaagtatttggctattccatacttgtatggaattggagaaactgacgactataggttctttgttataaagaatttgggaagagtattcgctgctccaaaggatacggaatcagtattcgatgcatgcgtcactatgataaacacgttagagtttatacactctcgaggatttacccatggaaaaatagaacctaggaatatactgattagaaataaacgtctttcactaattgactattctagaactaacaaactctacaagagtggagatggatattcacatatagattacaacgaggacgtgataacttcaggaaatatcaattatatgagtgtagacaatcatctcggagccacagtttcgagacgaggagatttagaaatgttgggatattgcatgatagaatggttcggtggcaaacttccatggaaaaacgaaagtggtatgaaagcaatacaacagaaaagagaatataaaaaatttatagctactttctttgaggactgttttccggaaggaaatgaacctctggaattagttagatatatagaattagtatacacgttagattattctcaaactcctaattatgacagactacgtagactgtttatacaagattgaaattatattctttttttatagggcgttgtgatagttacggatatcttaatatttagactatctctgtcactacacgaccaaatcgattactatggatatcttcagggagatcgcatcttctatgaaaggagagaacgtattcatttcttcagcgtcaatctcgtcagtattgacaatattgtattatggagctaacggatccactgctgaacagctatcaaaatatgtagaaaaggaggagaacaatgatacggttaatgctcagtgtatctcattcaaatccatgaataaagtatatgggagatattctgccatgtttaaagattcctttttgagaaaaattggcgataatttccaaactgttgacttcactgattgtcgcactatagatgctatcaataagtgtgttgatatttttactgaggggaaaatcaatccactattgactgaacaattgtctccagatacccgtctcctagcaattagtgccgtatactttaaagcaaaatggttgatgccattcgaaaaggaattcaccagtgattatccattttacgtatcaccaacggaaatggtagacgtaagtatgatgtctatgtacggcgagccatttaatcacgcatctgtaaaagaatcattcggcaacttttcaatcatagaactaccatatgttggagatactagtatgatggtaattcttccagacaagattgatggattagaatccatagaacaaaatctaacagatacaaattttaagaaatggtgtaactctctggaagctacgtttatcgatgtacacattcccaagtttaaggtaacaggctcgtataatctggtggatactctagtaaagttgggactgacagatgtattctgttcaactggagattatagcaatatgtgtaattcagatgtgagtgtcgacgctatgatccacaaaacgtatatagatgtcaatgaagagtatacagaagcagctgcagcaacttgtgcactggtgtcagactgtgcatcaacagttacaaatgagttctgtgcagatcatccgttcatctatgtgattaggcatgttgatggcaaaattcttttcgttggtagatattgctctccaacaactaattaagcacattcttaaatagaatattatatagttaagattgttactaactggttaacattttttaaaaaatagaaaaaacatatgacattagcgcaggtcgttattcttccaattgcaattggtaagatgacggccaactttagtacccacgtcttttcaccacagcactgtggatgtgatagactgaccagtattgatgacgtcagacaatgtttgactgaatatatttattggtcttcctatgcataccgcaacaggcaatgtgctggacaattgtattcaacgctcctctcttttagagatgatgctgaatcagtgttcatcgacattcgcgagctggtgaaaaatatgccgtgggatgatgtcaaagattgtgcagaaatcatccgttgttatataccggatgagcaaaaaaccatcagagagatttcgtctatcatcggactttgtgcatatgctgctacttactggggaggtgaagaccatcctactagtaacagtctgaatgcattgtttgtgatgctcgagctgctcaattacgtggattataacatcatattccggcgtatgaattgattgatttcgtacatcttgacttcagctcttcccctcccctctttccccattccccagaaacgcttttttacccactataaaataaaatgagtgcattattgactattctattgcctatatttttttattcttcattcattcatacttttaacaatattgaatgtatcgacaacgggctatattttacatcattcatggagttagaaaaagagccggtaatcctgccatgccctcaaataaacaccctgtcgtcaggatataatgtattagatattatatgggaaaaacgaggagctgataatgataacattataccgatagataatggtaccaatatgctaattctgaatccgacacaaactgactctggtatctatatatgtattaccaagaacgagacctactgcgatatgatgtcactgaatttgacaatcgtgaccgatacagaatcaaatatagatcttatctcgtatccacaaatagtaaatgaacgatctacaggtgaaatggtatgtcccaatattaatgcatttattgctagaaataaagacgtggatgttgatgttatatggagaggacatccacgactcagaaataagagacttacacaacgaccaattggaattattactatagaagatgttagaaaaaatgatgctggttattacacatgtgttttaaaatatacatacagggataagacatatgaagtaactagaattgtaaaattagaggtacgggatagaatcatacctcctactatgcaattaccagtagtcgttatgacttcactaggtagtaatttaactattgcgtgtagagtatcgttgagacctcccacaattgatgcagatgtcttttggataagtaataatgagtattacgaagaagatgatgaggatagcgacggtagaagtgtaacaaatagaatctttacgattgataaaagacgtgttattacatcgcggttaaacattaatcccgtaaaggaagacgatgctacaacgtttacatgtatggcgtttactgtacataatagtattagcaaaacagttactattagcataaagtgattacactaccatcttatttcattctatttcgggttaacagtttataaaaaatttttatttattatcatcaagcaaacaattaacgaacgtattgctgtgattaactcccacaatactatgcatagtattgatcattaacttgcagaacagtcctagtactattttaacgtaatcgtgttcttgtgtaattgcagtatctatattataaaagtacgtaaacctagctatagttttattttttaattttagataatagacagtctccttatttttaaaaattgttacatcctttattaaatcatgaatggggacttctatggaatcattagtatgttgtgaacaacaagagcagacatcaataggaaatggtggaagacgatacactgttctatgtagttttaaaatacacatgaactttgaagaatttatataaatcattccatcgatacatccttctatattgacatgtatatatccaggaattcttttattaatgtcaggaaatgtataaactaaaacatttcccgggagcggagcttctaccggtgttatatcagtttttaacttacaaaatgtaaccaatacctttgcatgacttgttttgttcggtaacgttagtttaaacttgacgaatggattaattacaataacatgatccgcgcatctattaagtttttttactttaacacccttgtatgtttttacagagactttatctaaatttctagtgcttgtatgtgttataaatataacgggatatagaactgaatcacctaccttagatacccaattacattttatcagatccagataataaacaaattttgtcgccctaactaattctatattgttatatattttacaattggttatgatatcatgtaataacttggaatctaacgcgcatcgtcgtacgtttacacaattgtgatttagtgtagtatatctacacatgtatttttccgcactatagtattctggactagtgataaaactatcattatatcgatcttcgatgaactcatcgagatattgctctctgtcatattcatacacctgcataaactttctagacattttacaatctgtgttattttaggatcatatttacatatttacgatatatcaaagatgttagatatagttaatgggactcgtttataataatgaatattaaacaattaaacaattatatgagaactttatacccacaaagcatcataaaaatgagtcgtcgtccgatttatgtcttaaatatcaatcgcaattcaactcataaaatacaagagaatgaaatatatacatattttagttattgcaatatagaccatacgtctacagaacttaattttgtagttaaaaactatgatctaaacagacgacaacctgtaactgggtatactgcactacactgctatttgtataataattactttacaaacgatgtactgaagatattattaaatcatgacgtggatgtaacgatgaaaaccagtagcggacgtatgcctgtttatatattgcttactagatgttgcaatatttcacatgatgtagtgatagatatgatagccaaagataaaaaccacttatcacatagagactattccaacctactactagagtatataaaatctcgttacatgttattgaaggaagaggatattgatgagaacatagtatcaactttattagataagggaatcgatcctaactttaaacaagacggatataccgcgttacattattattatttgtgtctcgcacacatttataaaccaggtgagtgtagaaaaccgataacgataaaaaaggccaagcgaattatttctttgtttatacaacatggagctaatataaacgagttagataattgcggcaatacaccattccatttatatcttgtagttgaaacttgtaataatatccatatgactaaaatgctattgatttttaatccgaatttcgaaatacgtaataatcatggattaacgcctatactatcttatataacttccgactacatacaacatgatattcttgtcatgttaatacatcactatgaaacaaatgttggagaaatgccgatagatgagcgtcgcatgatcgtattcgaatttatcaaaacatattctacacatccatcagattcgataacttatttgatgaataggtttaaaaatatagatattcatacccgttatgaaggaaagacgttattacacgtagcatgtgaatacaataatacacacgtaatagattatcttatacgtatcaatggagatataaatgcgttaaccgacaataacaaacacgctatccaactcattatagataacaaagaaaattccccgtataccatcgattgtttattgtatatacttagatatattgtagataagaatgtgataagatcgttggtggatcaagttccatctctacctatcttcaatataaaatcatttgagaaattcatatcctactgtatacttttagatgacacattttatgatagacacgttcaaaatcgcgattctaaaacgtatcgatacacattttcaaaatacatgtcgtttgataaatacgatgatataataactaaatgtcatgaagaaacaatattgctcaaactatccactgttctagatactacactatatacagttttaagatgtcataattcgagaaagttaagaagatacctcaatgaattaaaaaaatatattaatgatacgtccttcaaaatatattctaatattatgaatgagagataccttaatgtatattataaatatatgtacgtgtcaaaagtatacaataaactatttcctgttttcacggataaaaattgtctactaacattactaccttcagaaattatatatgaaatattatacatgttgacaatttacgatctttataatatatcgtatccatctaccaaagtatagttgtatttttatcatgtgttatgtgtaaaaactgatattatataattatcttagtaccgtatgatgaaaatgacgatgaaaatgatggtccgtatatattttgtatcattatcattatcattatcattattgctattccatagctacgccatagacatcgaaaatgaaatcacagaattcttcaataaaatgagagatactctaccagctaaagactctaaatggttgaatccatcatgtatgtttggaggcacaatgaatgatatggccgctctaggagagccgttcagtgcaaagtgtccgcctattgaagacagtcttttatcgcatagatataacgataaagacaatgtggttaactgggagaagataggaaagactagacgacctcttaatagacgtgttaaaaacggtgacttatggatagccaactatacatctaacgacagtcatcgtaggtatttgtgtaccgtaaccacaaagaatggtgactgtgttcagggtatagtaagatctcatattagaaaacctccttcatgcattccagaaacatatgaactaggtactcatgataagtatggcatagacttatactgtggaattctttacgcgaaacattataataatataacttggtataaaaataatcaagaactcattatcgatggtactaagtattcacaatctggtcagaatttaattattcataatccagagttagaagatagtggaagatacgactgttacgttcattacgacgacgttagaatcaagaatgatatcgtagtatcaagatgtaaaatacttacggttataccgtcacaagaccacaggtttaaactaatactagatccgaaaatcaacgtaacgataggagaacctgccaatataacatgcactgctgtgtcgacgtcattattggtcgacgatgtactgattgattgggaaaatccatccggatggattataggattagattttggtgtatactctattttaactagtagtggcggtatcactgaggcgaccttgtactttgaaaatgttactgaagaatatataggcaatacatatacatgtcgtggacacaactattattttgataaaactcttacaactacagtagtattggagtaaatacacaatgcatttttatatacattactgaattattactgaattattattattattattattattattaattatatcgtattgtgctatagaatggatgaagatacgcgactatctagatatttgtatctcaccgatagagaacatataaatgtagactctattaaacagttgtgtaaaatatcagatcctaatgcatgttatagatgtggatgtacggctttacatgagtacttttataattatagatcagtcaacggaaaatacaagtatagatacaacggttactatcaatattattcatctagtgattatgaaaattataatgaatattattatgatgattatgatagaactggtatgaacagcgagagtgagagtgataatatatcaatcaaaacagaatatgagaatgaatatgaattctatgatgaaacacaagatcaaagtacacaactagtaggttacgacattaaactcaaaaccaatgaggttgattttgtggatgaattctatggctatgatagatcagtgagtgtccatgattatatagatgaatcaatcaattaataaagtagtatatggaagagagtctcacgtaagatggcgggatatatggcaagaacataatgatagcgtatacagtataggaaaggagtgcatagataatatatacgaagacaaccataccgtagacgaattctacaatatagacagcgtatcagatgtagatgacgcggaacacatatctcagataactaatgatgtatctacacaaacgggaaaaagaaatcagagttagatagatacatggaaatgtatcctcgtcatagatatagtaagcattctgtctttaagggattttctgacaaagttagaaaaaatgatttagacatgaatgtggtaaaagaattactttctaacggtgcatctctaacaatcaaggatagcagtaataaggatccaattgctgtttattttagaagaacgataatgaatttagaaatgattgatatcattaacaaacatacaactattgatgaacgccggtatatagtacactcctatctaaaaaattatagaaatttcgattatccatttttcaggaagttagttttgactaataaacatggtctcaacaattattataatgtaggtgatagcaaatatggaacaccgctacatatattggcgtctaataaaaaattaataactcctaattacatgaagttattagtgtataacggaaatgatataaacgcacgaggcgaagatacacaaatgcgaaccccattacacaaatatttgtgtaaatttgtatatcataatattgaatatgttgtccgatactacaatgaaaagattatagacgcatttatagaattaggagccgatctaactattccaaataacgatggactgataccagtaatttactgtattatagtaaatgccgaatatggttataacaatattactaacataaagataatacgtaaactacttaatcttagcagacatgctccacataatctatttagagatcgagtcatgcacgattatataagtaatacatatattgatcttgagtgtttagatattattagatcgttggatggattcgatatcaatggttactttgaaggacgtacaccacttcattgcgctatacaacataacttcactcagattgcggaatacttattagatcgaggagctgatatatcattaaagacagactatggcaaaactgtatttgatttatcattatgtagttacatccctcttaaatggactagctttttgattagtcgtctaccgcctaaaagtgtcatatgctcactgactaaccatataatagattatgttcttacgaacaatagacctattatttggcagagtcaaatgattaataagtacgtgctgttactggatccatccttttattctagattcagaaatgctatcgaaagcaaattaaatcaatacaataatcgttataataggttcgaacacgatagagatcatgttaatgaaaagtatgaaaaactcttacatgacatcgacatatatatcaaggatgtacaagtattaaaatctatttccatcactaataatataacactatacgacactattataaataataagtcagtgtttcctatacgtcgcacaaacgacaaacaattaattaataaaataaaataaaataaaatccaatatatattataatcttatcgaaaaagttattaaaaattcattagagaaatgtactctaactaatgccgttctcgagtatatgatctcatctcgatctcaatcatcttatttgagtcgtattcctaatgagatattactcgaaatattatataaactcgacatgtacgatttacgtaatctatatacaagatatatgcgagagaatgatatcgcagagtatcatatagagaatgcgaggtcgatttctacacagactgatgaatgattatatactacatagtttataacatttggtatctataacactagtttttataagtcattatggcatttgtaatattgaaatcgtaatttgagatatagtgcacgatggatattgatgatattaaacataatagacgagtagtaagtaacattagcagtcttttagacaatgatatattatgtgatgtaattataactattggagatggagaagaaattaaagcgcataaaactatattggctgccggatctaaatattttagaacactgtttacaacacctatgataataagagatctagtaactagagtaaatctacagatgttcgataaagatgctgtcaaaaatattgtacaatacttatacaataggcatataagttctatgaatgtaatagacgtattaaaatgcgccgactatcttctaatcgatgatctagtaactgactgtgaatcttatgttaaggattatactaatcatgatacctgtatatatatttatcataggttgtatgagatgtctcatattccaatagtcaaatatgttaaacgtatggtgatgcgtaatataccaacattgataactacggatgcatttaaaaacgcagtattcgaaatattactcgatattatttctaccaacgatggtgagtatgtatacagagaaggatataaagtgacgatactattgaagtggctagattacaactacatcactgaagaacagctgttgtgtatactgtcctgtatagatatacaaaatctagataagaaatctagactactactctattcgaatacaactataaatatgtattcttcgtgtgtgaaatttctattagacaataaacagaatagaaacattataccccgtcagttatgtttagtatatcatgatactaactacaatataagtaacccatgtatattagtatataatattaatactatggaatacaataccatttacaccattcataataacataattaattactcatcagctgttgtcgataatgaaataataatagctggaggatataactttaacaatatatcattgaacaaggtatataaaataaatatcgaacacagaacatgtgtagaactcccacccatgataaagaatagatgtcatttttcactggctgtaatcgatgacatgatttatgctataggtggtcaaaacggtacaatagtggaacgaagcgtagaatgttatacaatgggcgatgatacgtggaagatgttacctgatatgcccgatgcaatatcgagctacggcatgtgtgtattcgatcaatacatatacattataggtggtcgtacagaacacgtcaaatatatacctgtacaacacatgaatgaaatagtagatataaacgaacattcttcagataaagttatacgatacgacactgtcaataatatatgggagaagttaccgaacttatgtagtggaaccataagaccaagcgttgtttcacataaagatgatatatatgttgtatgtgacatcaaagatgatgaaataaatggttttaagacttgtatatttagatataacacgaaggataattataaaggatgggaattgataacgactatagacagtaaattaaccgttttacatactattcttcacgacgatgccataacgatactacattggtatgaatcgtgtatgatacaagataaatttaatatcgacacctacaaatggactaatatatgttatcaacgttcgaatagttatatagtacacgatacactacccatctactaaataaaatacctcattatgagtttattatagacgactacccagattcatttcttatctaactatgacattcatacatatcagtattcattcttattcttatcgtctttagatgcttacataaaatgatattaaccatctattaaatgatttttatgcgtgtattattacttagtaatagtaatgtgagttgagttagttctgtccgaaaatgaattagtgtacaaactcaaatataaactgaagtttaaccttgtttttatgtctacttggcatgttgtcattgttgtctatactaacatggatatctttaaagaactaattttgaaatacaatgatgagaatgttttgatttctccagtttccattttatctactttatctattctacatcatggtgcagctggttctacagctgaacaactatcaaaatatatagagaatgtaaatgagaatgtatcagaggataaggatgacaataatgatgacatggacgtagatattccgtattgtgcgacactagctacagcaaataaaatatacggtagcgatagtatcgagttccatgcctccttcctacaaaaaataaaagacgattttcaaactgtaaactttaataatgctaaccaaacaaaggaactaatcaatgaatgggttaagacgatgacaaatggtaaaattaattccttattgactagtccactgcccattaatactcgcatggcagttgttagcgccgtccattttaaagcaatgtggaaatatccattttctaaacatcttacatatacagacaagttttatatttctaagaatatagttaccagtgttgatatgatggtgagtactgaaaatgacttacaatatgtacatattaatgaattattcggaggattctctattatcgatattccatacgagggaaactctagtatggtgattatactaccggacgacatagaaggtatatataacatagaaaaaaatataacagatgaaaattttaaaaaatggtgtggtatgttatctactaaaagtatagacttgtatatgccaaagtttaaagtggaaatgacagaaccgtataatctggtaccgattctagaaaatttaggacttactaatatattcggatattatgcagattttagcaagatgtgtaatgaaactatcactgtagaaaattttctacatacgacgtttatagatgttaatgaggagtatacagaagcatcggccgttacaggagtatttatgactaacttttcgatggtatatcgtacgaaggtctacataaaccatccattcatgtacatgattaaagacaatacaggacgtatactttttatagggaaatactgctatccacaataaatataaacaaatagacttttatcacgtttatctatgtctaaatattacaaatagtaatagcatacactaaacttaaaaataatatcatttactaactaatatagtataaactaaaaaattaaacaatatcattattataagtaataccaaaatgatgatatacggattaatactgtcttatattcgtgtcttcatccatcgctagtccactttacattcccgttattccacccatttcggaagataaatcgttcaatagtgtagaggtattagtttccttgtttagagatgaccaaaaagactatacggtaacttctcagttcaataactacactatcgataccaaagactggactatcaacgtactatccacacctgatggtctggagataccattgactaatataactattggtcacggtttccaactataggtcgtgcattgttcaaatcagagtccgaggatatcttccaaaagaatatgagtattataggtgtctctatagaatgtaagaagccatctacattacttactttttgaccgtgcgtaaaatgactcgagtatttaatagatttccagatatggcttattacagaggaaactgtctagaagccgtttatgtaacaatgacttataaaaatactaaactggagagactgattacacttacctctctaatggtggattgcctgaatactatcggttgatgagtaatggagtggatggttgattattgattagttttccttattctttttattcacacaaaaagaacatttttataaacatgaaaccactgtctaaatgtaattatgatattgatttatagatgaagatcagccttcaggaggattttaaccagtatgtttaatatgaaaaaataaacataacatattttgagattaagcgctattgtgattaaattattttgctctataaactgaatatatagccacaattattgacgggcttgtttatgaccggcaatcatgaatttacagaaattatctctggctatatatcttactgcgacatgttcgtggtgttatgaaacatgtatgagaaaaactgcgttgtttcatgacaacaatttagagcatgtagaagagaatcacgatagtggtgtagcgtcgctgccgtacaagtatctacaagtagtccatcaaagagaacgtagtagattgttggctacatttaattggacatctatagctgaggaggttaaaaatgagttcattaaaatatgtgatatcaacggaacatatatctataattatactattactgttagtatgattattgattccacggaagaactaccaacagttactccatttacaacatatgaaccgtctacctataattatactttcgataatagcactgttagtactaccgaagaactaaaagtgactccatcaccaactccatatgcgactgtaacaactcctcttccaacatcatcagttccatatgatcaacgatcgaataacaatgtaagtattatatctattcagatactaagtaaaatattgggagtcaatgaaacagaattaactaactatcttattacgcataaaaatgccatggttgacaataacacgattaataataacatcactgtcaacagtactacagtctatgatgatacatctgataataacacattgcatggtaacataggatttttggaaataaataattgctacaatgtctctgtatcagatgctagttttagaataacattagtaaacgatagttctgaagaaattgttctaatgctaacagggactagttcatccgacaccttcatatcttccaccaatatcactgaatgtttgaaaacattaatcaataatacgtcgaatattagcgacgtaagtataacacaaaatatgaatgtaacatctaattgtgataaatgctcaatgaatttgatgacatccgttattcctgttgttaatgaatttaacaatacgttggaaaaaattggtgtaaaagatgataaaaacaatacagtacataactattataattgtaaactaactacaaattctacgtgtgatgagttaatcaatttagatgaagtcattaacaacataactctgacaaatattataagtagtagtgcttcgacaatcaacaacagaaaaagacgagatctgaatggagagtttgaattttctacgtccaaggaattagattgtctgtacgaagcatatggtgtaaacgaggatataagtcattgttttgcatcgcctagacatagacgatccgacgacaaacaggagttcatagaaatgaaattactcgaccatgcgaaaaaagatttaagcatagacagtgttattcctagaggtacaactcattttcaagtaggtgcatctggagcaagtggtggtgttgtaggagatagtaacccatttcaaaatgttaaatcacgggctagtctattggcagaaaaaataatgcctagagtacctactactgctaccgaagaccagctatatgcaactataaatagacaagccaagttgcctgcaggtgttaaaagtactccatttacagaggcggttgtgtctacgataaaccaaaagctttctagtgttaaagaggtaacttatgcttctctcaatctaccaaaatcaagtggctatattcatagaccatctgaatctgttatttacagaactataagacggacacgtttacctagtgatagcgatagtgattttgaggatatacaaactgttgttaaggaatataatgaaagatatggtagacgagtaagtagaacacagtcatcaagtagcagtgattttgaaaatatagatgaggtggttgcagaatataaacaaaaatatggtggagcagctagcagggttagaacatcgtcatcaagtagtagtgattttgaaaatatagatgaggtggttgcagaatataatcaaaaatatggcaacgccatgacaaaaggacgtggttctcttaaaccggatccgttatatagtactgttaagaaaacacctaaaagtatagcatccggagtagacatagtttcaaaacaaacagactattctctattacctggtgtgaatacaggcagttctattgtgacgcctctcaccagaagaggagctactagacgacctaaacgcccatctacacctccacgcgaagatctaccaccgcttcctccgaatcctcctcatcgacaacttcctcgtggtggcgatcattctctaccacaagttcctcaacgtgattattctccaccacgtagacctcctccaccacttcctcctaaaccagttccagctattccacctagagatggtcaaccagataataaaggatttagtaagtttgtatcccctagacggtgtagaagatcaacctctggagtcttatgtggtatgatacaatcaagaccaaacgatgatgtatattcacttcttcaacgaccaaaaattgaaccagaatatgcggagatcggtaatggcttacccaagaacaatgttcctgtgataggcaagaaacatagtaaaaaatataaatcatcaatgacaaaaatatcaacaaaatttgataaatctatggcatttggaaccgcaatgttactaactggtcaacaggctattaaccaacaggttagatcaactgcgttgattagaaaagatcagatgagcaaggacgaaaagatattcgaagcagttacaatgactctatcaactataggttcaacgttgacaactgcaggtatgatatctccaccactaatgattgctggaatgggtatatcgcttatatcaggtataatagatacggtaaaagatatatattacctgttttcaggacatgagaagccggtagatccagttattaagttttttaatacatacgctggattagtatccgatagtagtaaaatgggtgtaaggaaatgtttgacgcctggagaagacacacttatttacatcgcatatagaaacgataccagttttaaacagaatacggaggcaatggctttgtatttcttagatgttatcgattcagagatcctatatctaaacacatcaaatttagttctagagtatcaactaaaggtggcttgtccaataggaacattaagatctgtagatgttgacataactgcttatacaatattatatgatacagcggataatattaagaaatacaagtttgtcagattggcaacgctactatccaaacatccagttattagattgacatgtggtttagcagcaacattggtaattaaaccgtacgaggtacccatcagtgatatgcaactactaaaaatggcgacgcatggtgaaccagaatcaactaaatctataccatctgatgtctgtgataagtatcctctaaagaaattctatcttttggcaggtggttgtccctatgacacatctcaaacttttattgtacatactacttgcagtattctactaagaacagctacatgggatcagtttagaaaccgatgggtgttacaaaatccatttaggcaagaagggacatataagcaactgtttacctttagcaaatacgattttaatgacaccataatagatcctaatggtgtggcgggtcatgctagcttttgtaccaatagaagcagcaaccaatgtttctggtccgaacctatgatattggaagacgtgtcatcatgcagttctagaactagaaaaatatacgtaaaactgggaatatttaatgctgaagggtttaatagttttgtactaaattgtccaactgggtctacaccgacatacatcaaagataaaaatgcggacagtaacaatgttatcatagagctacctgtaggtgattacggcactgccaaattgtattcggcaacaaaacagtcaaggatagctgtgttctgcacacataactatgataaacgattcaaatcagatattattgttctaatatttaatagtatcagtgatattcgattttcgagcatatacactggagacgtgaacggtagaaatagactgtttatcacattgtctagaggaatgccatatagatcaatgtattgcgataacagacgaccaggttgttattatgcaggaataccatttaatgaaaatagtgtagaatcagatctgcattatggaccagaaataatgcttaaggaaacatatgacgcaaacagtattgatccacgagttataacaaagtcaaagacacactttcctactccaataagtgtaaaattcatggttgccaatttaggaaatgggtataacaaacccgaaaatttttggaacgacgctaaaagtaagaaaaggacatatagcgcaatgacaataaaaatcctaccatgtacagtgagaaataaaaatgtaaactttggatataactatggacatattatttctaatatggtttatgcacaatctactagttatgattatggtgatggtaccaactatacatttaaatctgtaaatagatcagatcatgagtgtgaatctattttagatttgaaggctaaggaagtaactgtgacgtgtcccgcgtttagtataccaagaaatatatcagcgtatgaaggtctatgctttagtgtcactacatctaaagatcattgtgccacagataataattggttaaaatctcatggttatggaaaggcagatgctattaaacaacgtgcctgttttcatcattggaattatgttacaacgtcgttggattattactgttcggcagaaaatgtttttaaaagctactggccggactatgatccatgtaagtcatatattcatatagaatatagagacatatggatagaatctaacgtgttacagcaacctccttacacattcgaattcactcatgacaattctaacgaatatgtggataaagaaattagtaacaaattaaatgatctgtacaatgaatacaagaagattatggaatatagcgacggatcattgccggcgtctataaacagattagcaaaggcattgacttcagagggtagagaaatagcaagtgttaatatagatggtaatctgttagatattgcatatcaagcagataaggaaaagatggctgagatacagaacaaaataaatgatatcaccagagatttatttatacacactctatcagacaaagatataaaagacattatagaatccgaagaaggtaagagatgttgtataatagatgttaagaacaatcgtgttgaaaagtactatcctattgataattatctatgtggtactttagatgattatatatacacctctgtagagactaacaaatcttatgtgttagtaaacgacacttatatgagctatgactatcttgaatcatcaggtgtagttgttttatcatgttatgaaatgactataatctccttggatacaaaagatgccaaagatgctatagaagatgagatagtagcaagtgctgtagcagaagcattgaatgacatgtttaaggaattcgataaaaacgtaagtgttattataataaaagaagaagataattatctaaacagttcgtcagatatctacaatatattatatatcatatgtggcgctattctgctactgttagtcattattttgatattggcaatttatatagcgcgcaataaatatagaaccaggaaatataaaatgatgaaggattacgacaataggagcattaaatctgagcatcataatagtcttgaaacagtatctatggaaattatggataatcggtactaataaaatagtttaacgcttttagaaccagtttggtactggaagttcagttcattactagttgagaatattgatgatttttttaaaatgatatttacgtttacatgcttgcatcacagaatgatatattcacaagtattattaaaaatgagtatcgatagttacattaccatatcatccatgctcatgtggatctctattcattatataatcaatgataaatgttattagaatactttccgaataagtcttctaaatattgtattaattatgaaaaactatgctacgcgattatgatgcaacgatgtttaatgatacgatagattttataactagcgagatgtcatcagaatcatttatcataactatgtttaataataattcatcaacgaatatagataacatgtgttatttatactttgaatacttcgaagtctgtccatcttctctattatttagacactgtttatagaatgctgtgatataaacaaactactagaatctgggacaactctattacactgttatctaatgaatgaaagatttgaatcatctgttttaaaaaacctagtaaaggagtatggcatgaatacgtttaatgttcgtgattagtgatggacacattccgttacacaaatatctaactcatgataaagttgagaatgatatctttgatatgctttctgataaactactacgtgctatataagttgttgagaaaaggagcagacactaattatgcagatgatagaggtaatacttttcttcattacttctgcgtctatatgtccacttataataagatgccattcaataagatgcatcgtgaaaagaaatttattaaagagttggtaaaatatggagctgatattaataaagtaaataatagaggaaatacacctctacacttctacatatcacaatatgatcacagtcctcgtataatatttactcttttatcattgggagctgacttgacaatacaaaaacaatgttcgtctaactcccataatggaatatataaaatgtgaagatatagaatacaatactcttttaatgttaattaattggtacgagtcaaatacagaaaactagaaaagaaagaaggtcggcatctccttatatctatctattcataaggataatgatagtaatgaccttaatatactatcctatttactaaagaagtttgacataaaaacgatgaatactttaatgacgttatacctctacataatgcttatagcgtgcaacgttgatataatgtcttatctcgtatatattggatgtaatattaatctcccaactaacgataacaagagtatatttgatattatattagcacaaacagataataagctatatatagattgtattatctatcatcttataaaacacggactagatataacgttatccgtaatcaaaaaataattagtattattccgtattttccaaatgattactatgtaagatatataataacttattgcatcttaatgaacaacaatttcataaaagaatacaataatcaatgtttaaatcatacgtacgaagaactatttattgatttaataacattcgattatatagataatatcgttcagattgcgtcaatgatataaataggctcaaacaagaaaactattataatatattaagatatgaagatataaaatataaaatatacaatctagttaatgatatccatgttacaaacaagacttttcccatgtacatggacattatagagaattgtaacgtacacataaaacgtaaatataaactcataaatactgtcattgacaaaatatatagtatatcatcgtctgttgataataacaaactctcactattgcctccagaaatcatacgcgagataatatccaagttaagcgaatacgatttaaatactattttgtatggtcgtaaccatctaaaacattattataaatttaactagatattaatgatgaagatgacaccatcatatatcttgttggtatatatgttcgtagtcgtaagtggagatgttccgtatacacccattaatgggaaatgtaacggtacagactataacagtaataatctatgttgtaaacaatgcaatcctggaatgtatatgactcattcctgtaataccacttctaatacaaaatgtgacaagtgcccagatgacacctttacatccattcctaatcatagtcccgcgtgtctaagttgtcgaggcaaatgtagcagtaatcaagtagagactaaatcgtgtagtaacacacaggacagagtatgtgtctgtgcatccggatactactgcgaatttgaaggatcaaacggttgcaggctatgtgtaccacaaacaaagtgtggttctggttacggtgtatatggctactcatctaaaggagatgtaatatgtaaaaagtgtccgggtaatatagataaatgtgatctgtcctttaacagcatagatgtagaaattaatatgtatcctgttaacaagacctcttgtaattcgagtataggaagcagcagtaccatatcaacttccgagttaacaattactctaacacatgaggattgtactcctgtctttattggagattactattcagtcgttgataaactagcaacttcaggtttctttacaaacgataaagtacatcaagacctcacaacgcagtgcaagattaatctagaaatcaaatgtaattctggaagagaatctagacaactaacacccacgacgaaggtatactttatgcctcattcagaaacggtaactgtggtaggagactgtctctctaatctcgatgtctatatagtatatgccaatacggacgcgatatattccgacatggacgtcgtcgcgtatcatactagttatatactaaatgttgatcatattccaccaaatgattgtgaaagagattgagattaaatcgtctaacaaacaattagtttttatgacattaacatataataaataaattaatcattattgacttaacgatgacgaaagttatcatcatcttaggattcttgattattaatacaaattcattgtctatgaaatgtgaacaagaattaaagtgttgtaaactatgtaagccaggaacatattcagatcatcgatgtgataaatacagcgataccatttgtgggcattgtccgagtgacgcattcacgtcaatatataatcgttctccttggtgtcatagttgtagaggtcacatcttgtacacctaccacaaatagaatctgtcattgtgtctcgaatagttattgtctccttgaagcttctgatggtaactgtgttacatgtgctcctaaaacaaaatgtggtcgtggatatggaaagaaaggggaagatgaaatgggtaacaccatttgtaagaaatgtcggaagtgtacgtattcagatattgtatctcactctgatccatgtaaaccaaggacgagataatatatactcactggatagacaaaataagttggattatccatctctccctcatcccctccctcactttttatcatcctatatgttattccttccttttctcgcatcatttttcgtgaaatataatataggaataattaacaccagaatagctatggcctgcggtaaagattgtgcatgtattctgtgtcgtctactggatgaagatataacgtacaaaaaataaaaccagagattgaaacgtatcgcaacttatcaaaacatatagatagacgaggaaacaatgcgctacattgttacgtctccaataaatgcgatacagacattaagattgttcgactgttgctctcttgcggaatttatcatggagtgaatgtcctgtttcatttgtttccatgacatattacaaaatcgattccgtccaagatgataaaaacatttaccggcatcataaacacggagtttattttatatggctcgcataaaattactaaaaatatattgatctgtttttctttttctttcgtacatttctaattatgaaaaagtaaatcattatgagatgggcgagatggacgagattgtacgcatcgttcgcgacagtatgtggtacatacctaacgtatttatagacgacggtgagaatgaaggtcacatttctgtcaacaatgtctgtcatatgtatttcacattctttgatgttgatacatcgtctcatctgtttaagttagttattaaacactgcgatctgaataaacgactaaaatgtggtaactctccattacattgctatacgatgaatacacgatttaagccatctgtattaaagatattgttacaccacggcatgtgtaactttgatagcaaggatgaaaaaggacatattcctctacaccactatctgattcattcactatcaatcgataacaagatctttgatatactaacggaccacattgatgactttagtaaatcatccgatctattgctgtgttatcttagatataaattcaatgggagcttaaactactacgttctgtacaaattattgactaaaggatctgaccctaattgcgtcgacgaggatggactcacttctcttcattactactgtaaacacatatccgcgttccacgaaagcaattattacaagtcaaagagttacactaagatgcgagctgagaagcgattcatctacgcgataatagatcatggagcaaacattaacgcggttacgaaaatcggaaatacgccgttacacacttaccttcaacagtataccaaacatagccctcgtgtggtgtatactcttttatctcgaggagccgatacgaggatacgtaataatcttgattgtacacccatcatggaatacataaagaacgattgtgcaacaggtcatattctcataatgttactcaattggcacgaacaaaaatacgggaaattacaaaaggaagaaggacatcatctactttatctattcataaaacataatcaaggatacggaagtcacgctctcaatatattacggtatctactagataggttcgacattcagaaagacgaatactataataccatgactcctcttcataccgccttccagaattgtaacaacaatgttgcctcatacctcgtatacatcggatacgacatcaaccttccgactaaagacggtaagacagtattcgacttggtgtttgaaaacagaaacatcttatacaatgcggatattcacgacatcatccaccacagactgaaagtatctctacctatgatcaaatcgttgttctacaggatgtccgagttctctccttacgacgattactacgtaaagaagataatagcctactgcctattaagggacgaatcattcgcggaactacatagtaaatcctgtttaaacaaggactataaaagtgtatttatgaaaaatatatcattcgataagatagattccatcatcgaaaaatgtagtcgtgacataggtcgcctcaaagagattcgaatctccgacaccgacctgtatacggtattaagaacagaagacatacggtatcacagctatcttgaagtcatacattcggacaaacatatctcatttcccatgtacgacgatctcatagaacagtgccatctatcgatggagcgtaaaagtaaactcgtagacaaagcactcaataaattagagtctatcatcgatggtcaatctagactatcgtatttgcctccggaaattatgcgcaatatcataaccaagctaagcgactatcatctaaacagtatgttgtacggaaagaaccattacaaatattattcataatagaaagaaaatatttaaaaatatctatatgatttgagaagtaggaaacaggaacaagacgataattactacattattaaatcatgaagtccgtattatactcgtatatattgttctctcatgtataataaacggaaaagatatagcaccgcatgctccatccaatggaaagtgtaaagacaacgaatacagacgccgtcccacccactttttatagtaagttttttacccataaataataaatacaataattaatttctcgtaaaagtagaaaatatattctaatttattgtatggtaaggaaatagaatcatctagaacagcaatcatgaaacaatatatcgtcctggcatgcatatgcctggcggcagctgctatccctaccagtcttcagcaatcattcgcatcctcgtgtacggaagaagaaaacaaccatcatatgggaatcgatgttattatcaaagtcaccaagcaagaccaaacaccgactaatgataagatttgtcaatcagtaaccgaagttacagagtctgaagacgatggggtatccgaagaagtcgtaaaaggagatcccaccacttattacactgtcgtcggtggaggtctgagaatgaactttggattcaccaaatgtcctcagattaaatccatctcagaatccgctgatggaaacacagtgaatgctcggttgtctagcgtctctccaatgtacggcattgaatctccagccatcactcatgaagaagctcttgctatgatcaacgactgtgcggtgtctatcaatatcaaatgtagtgaagaagagaaagacagcaacatcaagacccatccagtactcgggtctaacatctctcataagaaagtgaggtacgaagatatcatcggttcaacgatcgtcgatataaaatgtgtcaaggatctagagtttagcgttcgtatcggagacatgtgcaaggaagcatctgaacttgaagtcaaggatggattcaagtatatcgacggatcggtatctgaaggtgcaaccgatgatacttcactcatcgattcaacaaaactcaaagcgtgtgtctgaatcgataactctattcatctgaaattggatgagtggggttaatcgaacgattcaggcacaccacgaattaaaaaagtgtaccggacactactccggtttgcaaaacaaaaatgttcttaactacattcacaaaaagttacctctcgttacttcttctttttctgtctcaagtgtgatacgattatgagcacttttcctatttcctttcagggtatcacaaaaatatttttattctctttctctcttcgatggtctcataaaaaagttttacaaaaatatttttattctctttctgatggagtcgtaaaaaagttttatctctttctctcttcgatggtctcataaaaaagttttacaaaaatatttttattctctttctgatggagtcgtaaaaaagttttatttctttctctcttcgatggtctcataaaaaagttttacaaaaatatttttattctctttctgatggagtcgtaaaaaagttttatctctttctctcttcgatggtctcataaaaaagttttacaaaaatatttttattctctttctgatggagtcgtaaaaaagttttatctctttctctcttcgatggtctcataaaaaagttttacaaaaatatttttattctctttctgatggagtcgtaaaaaagttttatctctttctctcttcgatggtctcataaaaaagttttacaaaaatatttttattctctttctgatggagtcgtaaaaaagttttatctctttctctcttcgatggtctcataaaaaagttttacaaaaatatttttattctctttctgatggagtcgtaaaaaagttttatctctttctctcttcgatggtctcataaaaaagttttacaaaaatatttttattctctttctgatggagtcgtaaaaaagttttatctctttctctcttcgatggtctcataaaaaagttttacaaaaatatttttattctctttctgatggagtcgtaaaaaagttttatctctttctctcttcgatggtctcataaaaaagttttacaaaaatatttttattctctttctgatggagtcgtaaaaaagttttatctctttctctcttcgatggtctcataaaaatattaaaacctcattctgatgcatcaactatttcttaaacaataacgtccaacaacatatactcatagagcttatcaaacatcccctgtgcccatctaggttgccagacaattgcatcataaaataatgtttataatttacacgttaacatcatataataaacgtatatagtataatattttttggcatataaatgatctagtaaaatccatgtaggggatacggctcacgtttttttctttggtacaaaatttcacacagtttttatacagacaaatattctctcatccatatattttaaaacattgacttttgtactaagaaaatattaaacctctttctgacggagtcgtaaaaaagttttatcctttctccttcgatggtctcacaaaaatattaaacctctttctgatagtctctataaagcgattgatttttcttaccctcagagtttcctacagtcgtg

SEQ ID NO: 3 - DNA, 210609 bp, Artificial Sequence
  Synthetic Construct, Sequence of ECTV-EGFP
cacgactgtaggaaactctgagggtaagaaaaatcaatcgctttatagagactatcagaaagaggtttaatatttttgtgagaccatcgaaggagaaaggataaaacttttttacgactccgtcagaaagaggtttaatattttcttagtacaaaagtcaatgttttaaaatatatggatgagagaatatttgtctgtataaaaactgtgtgaaattttgtaccaaagaaaaaaacgtgagccgtatcccctacatggattttactagatcatttatatgccaaaaaatattatactatatacgtttattatatgatgttaacgtgtaaattataaacattattttatgatgcaattgtctggcaacctagatgggcacaggggatgtttgataagctctatgagtatatgttgttggacgttattgtttaagaaatagttgatgcatcagaatgaggttttaatatttttatgagaccatcgaagagagaaagagataaaacttttttacgactccatcagaaagagaataaaaatatttttgtaaaacttttttatgagaccatcgaagagagaaagagataaaacttttttacgactccatcagaaagagaataaaaatatttttgtaaaacttttttatgagaccatcgaagagagaaagagataaaacttttttacgactccatcagaaagagaataaaaatatttttgtaaaacttttttatgagaccatcgaagagagaaagagataaaacttttttacgactccatcagaaagagaataaaaatatttttgtaaaacttttttatgagaccatcgaagagagaaagagataaaacttttttacgactccatcagaaagagaataaaaatatttttgtaaaacttttttatgagaccatcgaagagagaaagagataaaacttttttacgactccatcagaaagagaataaaaatatttttgtaaaacttttttatgagaccatcgaagagagaaagagataaaacttttttacgactccatcagaaagagaataaaaatatttttgtaaaacttttttatgagaccatcgaagagagaaagagataaaacttttttacgactccatcagaaagagaataaaaatatttttgtaaaacttttttatgagaccatcgaagagagaaagaaataaaacttttttacgactccatcagaaagagaataaaaatatttttgtaaaacttttttatgagaccatcgaagagagaaagagataaaacttttttacgactccatcagaaagagaataaaaatatttttgtaaaacttttttatgagaccatcgaagagagaaagagaataaaaatatttttgtgataccctgaaaggaaataggaaaagtgctcataatcgtatcacacttgagacagaaaaagaagaagtaacgagaggtaactttttgtgaatgtagttaagaacatttttgttttgcaaaccggagtagtgtccggtacacttttttaattcgtggtgtgcctgaatcgttcgattaaccccactcatccaatttcagatgaatagagttatcgattcagacacacgctttgagttttgttgaatcgatgagtgaagtatcatcggttgcaccttcagataccgatccgtcgatatacttgaatccatccttgacttcaagttcagatgcttccttgcacatgtctccgatacgaacgctaaactctagatccttgacacattttatatcgacgatcgttgaaccgatgatatcttcgtacctcactttcttatgagagatgttagacccgagtactggatgggtcttgatgttgctgtctttctcttcttcactacatttgatattgatagacaccgcacagtcgttgatcatagcaagagcttcttcatgagtgatggctggagattcaatgccgtacattggagagacgctagacaaccgagcattcactgtgtttccatcagcggattctgagatggatttaatctgaggacatttggtgaatccaaagttcattctcagacctccaccgacgacagtgtaataagtggtgggatctccttttacgacttcttcggataccccatcgtcttcagactctgtaacttcggttactgattgacaaatcttatcattagtcggtgtttggtcttgcttggtgactttgataataacatcgattcccatatgatggttgttttcttcttccgtacacgaggatgcgaatgattgctgaagactggtagggatagcagctgccgccaggcatatgcatgccaggacgatatattgtttcatgattgctgttctagatgattctatttccttaccatacaataaattagaatatattttctacttttacgagaaattaattattgtatttattatttatgggtaaaaaacttactataaaaagtgggtgggacggcgtctgtattcgttgtctttacactttccattggatggagcatgcggtgctatatcttttccgtttattatacatgagagaacaatatatacgagtataatacggacttcatgatttaataatgtagtaattatcgtcttgttcctgtttcctacttctcaaatcatatagatatttttaaatattttctttctattatgaataatatttgtaatggttctttccgtacaacatactgtttagatgatagtcgcttagcttggttatgatattgcgcataatttccggaggcaaatacgatagtctagattgaccatcgatgatagactctaatttattgagtgctttgtctacgagtttacttttacgctccatcgatagatggcactgttctatgagatcgtcgtacatgggaaatgagatatgtttgtccgaatgtatgacttcaagatagctgtgataccgtatgtcttctgttcttaataccgtatacaggtcggtgtcggagattcgaatctctttgaggcgacctatgtcacgactacatttttcgatgatggaatctatcttatcgaatgatatatttttcataaatacacttttatagtccttgtttaaacaggatttactatgtagttccgcgaatgattcgtcccttaataggcagtaggctattatcttctttacgtagtaatcgtcgtaaggagagaactcggacatcctgtagaacaacgatttgatcataggtagagatactttcagtctgtggtggatgatgtcgtgaatatccgcattgtataagatgtttctgttttcaaacaccaagtcgaatactgtcttaccgtctttagtcggaaggttgatgtcgtatccgatgtatacgaggtatgaggcaacattgttgttacaattctggaaggcggtatgaagaggagtcatggtattatagtattcgtctttctgaatgtcgaacctatctagtagataccgtaatatattgagagcgtgacttccgtatccttgattatgttttatgaatagataaagtagatgatgtccttcttccttttgtaatttcccgtatttttgttcgtgccaattgagtaacattatgagaatatgacctgttgcacaatcgttctttatgtattccatgatgggtgtacaatcaagattattacgtatcctcgtatcggctcctcgagataaaagagtatacaccacacgagggctatgtttggtatactgttgaaggtaagtgtgtaacggcgtatttccgattttcgtaaccgcgttaatgtttgctccatgatctattatcgcgtagatgaatcgcttctcagctcgcatcttagtgtaactctttgacttgtaataattgctttcgtggaacgcggatatgtgtttacagtagtaatgaagagaagtgagtccatcctcgtcgacgcaattagggtcagatcctttagtcaataatttgtacagaacgtagtagtttaagctcccattgaatttatatctaagataacacagcaatagatcggatgatttactaaagtcatcaatgtggtccgttagtatatcaaagatcttgttatcgattgatagtgaatgaatcagatagtggtgtagaggaatatgtcctttttcatccttgctatcaaagttacacatgccgtggtgtaacaatatctttaatacagatggcttaaatcgtgtattcatcgtatagcaatgtaatggagagttaccacattttagtcgtttattcagatcgcagtgtttaataactaacttaaacagatgagacgatgtatcaacatcaaagaatgtgaaatacatatgacagacattgttgacagaaatgtgaccttcattctcaccgtcgtctataaatacgttaggtatgtaccacatactgtcgcgaacgatgcgtacaatctcgtccatctcgcccatctcataatgatttactttttcataattagaaatgtacgaaagaaaaagaaaaacagatcaatatatttttagtaattttatgcgagccatataaaataaactccgtgtttatgatgccggtaaatgtttttatcatcttggacggaatcgattttgtaatatgtcatggaaacaaatgaaacaggacattcactccatgataaattccgcaagagagcaacagtcgaacaatcttaatgtctgtatcgcatttattggagacgtaacaatgtagcgcattgtttcctcgtctatctatatgttttgataagttgcgatacgtttcaatctctggttttattttttgtacgttatatcttcatccagtagacgacacagaatacatgcacaatctttaccgcaggccatagctattctggtgttaattattcctatattatatttcacgaaaaatgatgcgagaaaaggaaggaataacatataggatgataaaaagtgagggaggggatgagggagagatggataatccaacttattttgtctatccagtgagtatatattatctcgtccttggtttacatggatcagagtgagatacaatatctgaatacgtacacttccgacatttcttacaaatggtgttacccatttcatcttcccctttctttccatatccacgaccacattttgttttaggagcacatgtaacacagttaccatcagaagcttcaaggagacaataactattcgagacacaatgacagattctatttgtggtaggtgtacaagatgtgacctctacaactatgacaccaaggagaacgattatatattgacgtgaatgcgtcactcggacaatgcccacaaatggtatcgctgtatttatcacatcgatgatctgaatatgttcctggcttacatagtttacaacactttaattcttgttcacatttcatagacaatgaatttgtattaataatcaagaatcctaagatgatgataactttcgtcatcgttaagtcaataatgattaatttatttattatatgttaatgtcataaaaactaattgtttgttagacgatttaatctcaatctctttcacaatcatttggtggaatatgatcaacatttagtatataactagtatgatacgcgacgacgtccatgtcggaatatatcgcgtccgtattggcatatactatatagacatcgagattagagagacagtctcctaccacagttaccgtttctgaatgaggcataaagtataccttcgtcgtgggtgttagttgtctagattctcttccagaattacatttgatttctagattaatcttgcactgcgttgtgaggtcttgatgtactttatcgtttgtaaagaaacctgaagttgctagtttatcaacgactgaatagtaatctccaataaagacaggagtacaatcctcatgtgttagagtaattgttaactcggaagttgatatggtactgctgcttcctatactcgaattacaagaggtcttgttaacaggatacatattaatttctacatctatgctgttaaaggacagatcacatttatctatattacccggacactttttacatattacatctcctttagatgagtagccatatacaccgtaaccagaaccacactttgtttgtggtacacatagcctgcaaccgtttgatccttcaaattcgcagtagtatccggatgcacagacacatactctgtcctgtgtgttactacacgatttagtctctacttgattactgctacatttgcctcgacaacttagacacgcgggactatgattaggaatggatgtaaaggtgtcatctgggcacttgtcacattttgtattagaagtggtattacaggaatgagtcatatacattccaggattgcattgtttacaacatagattattactgttatagtctgtaccgttacatttcccattaatgggtgtatacggaacatctccacttacgactacgaacatatataccaacaagatatatgatggtgtcatcttcatcattaatatctagttaaatttataataatgttttagatggttacgaccatacaaaatagtatttaaatcgtattcgcttaacttggatattatctcgcgtatgatttctggaggcaatagtgagagtttgttattatcaacagacgatgatatactatatattttgtcaatgacagtatttatgagtttatatttacgttttatgtgtacgttacaattctctataatgtccatgtacatgggaaaagtcttgtttgtaacatggatatcattaactagattgtatattttatattttatatcttcatatcttaatatattataatagttttcttgtttgagcctatttatatcattgacgcaatctgaacgatattatctatataatcgaatgttattaaatcaataaatagttcttcgtacgtatgatttaaacattgattattgtattcttttatgaaattgttgttcattaagatgcaataagttattatatatcttacatagtaatcatttggaaaatacggaataatactaattattttttgattacggataacgttatatctagtccgtgttttataagatgatagataatacaatctatatatagcttattatctgtttgtgctaatataatatcaaatatactcttgttatcgttagttgggagattaatattacatccaatatatacgagataagacattatatcaacgttgcacgctataagcattatgtagaggtataacgtcattaaagtattcatcgtttttatgtcaaacttctttagtaaataggatagtatattaaggtcattactatcattatccttatgaatagatagatataaggagatgccgaccttctttcttttctagttttctgtatttgactcgtaccaattaattaacattaaaagagtattgtattctatatcttcacattttatatattccattatgggagttagacgaacattgtttttgtattgtcaagtcagctcccaatgataaaagagtaaatattatacgaggactgtgatcatattgtgatatgtagaagtgtagaggtgtatttcctctattatttactttattaatatcagctccatattttaccaactctttaataaatttcttttcacgatgcatcttattgaatggcatcttattataagtggacatatagacgcagaagtaatgaagaaaagtattacctctatcatctgcataattagtgtctgctccttttctcaacaacttatatagcacgtagtagtttatcagaaagcatatcaaagatatcattctcaactttatcatgagttagatatttgtgtaacggaatgtgtccatcactaatcacgaacattaaacgtattcatgccatactcctttactaggttttttaaaacagatgattcaaatctttcattcattagataacagtgtaatagagttgtcccagattctagtagtttgtttatatcacagcattctataaacagtgtctaaataatagagaagatggacagacttcgaagtattcaaagtataaataacacatgttatctatattcgttgatgaattattattaaacatagttatgataaatgattctgatgacatctcgctagttataaaatctatcgtatcattaaacatcgttgcatcataatcgcgtagcatagtttttcataattaatacaatatttagaagacttattcggaaagtattctaataacatttatcattgattatataatgaatagagatccacatgagcatggatgatatggtaatgtaactatcgatactcatttttaataatacttgtgaatatatcattctgtgatgcaagcatgtaaacgtaaatatcattttaaaaaaatcatcaatattctcaactagtaatgaactgaacttccagtaccaaactggttctaaaagcgttaaactattttattagtaccgattatccataatttccatagatactgtttcaagactattatgatgctcagatttaatgctcctattgtcgtaatccttcatcattttatatttcctggttctatatttattgcgcgctatataaattgccaatatcaaaataatgactaacagtagcagaatagcgccacatatgatatataatatattgtagatatctgacgaactgtttagataattatcttcttcttttattataataacacttacgtttttatcgaattccttaaacatgtcattcaatgcttctgctacagcacttgctactatctcatcttctatagcatctttggcatcttttgtatccaaggagattatagtcatttcataacatgataaaacaactacacctgatgattcaagatagtcatagctcatataagtgtcgtttactaacacataagatttgttagtctctacagaggtgtatatataatcatctaaagtaccacatagataattatcaataggatagtacttttcaacacgattgttcttaacatctattatacaacatctcttaccttcttcggattctataatgtcttttatatctttgtctgatagagtgtgtataaataaatctctggtgatatcatttattttgttctgtatctcagccatcttttccttatctgcttgatatgcaatatctaacagattaccatctatattaacacttgctatttctctaccctctgaagtcaatgcctttgctaatctgtttatagacgccggcaatgatccgtcgctatattccataatcttcttgtattcattgtacagatcatttaatttgttactaatttctttatccacatattcgttagaattgtcatgagtgaattcgaatgtgtaaggaggttgctgtaacacgttagattctatccatatgtctctatattctatatgaatatatgacttacatggaaaatgacctatatgttgatacttgataattagtataattactatgtattatattcattattatgaggaggatttatgtcatatcatgaaattaataagagaactagattaaagtaataggaattggaattggaattactctttatttgtcgcactattataaaaagatgttatatctcaatcactgctataaagatccatcatatctatgataccgtatcagttcctatcaatctctgttttgggtgaattcaaaaaaattaataatacctagaaaatattccacgagcattccttttatcgatatagcatttggatagcctgtcaatatcgacatcattgaacaacggattcatcttacacttttcacgaacatcctgagatacattgttccatcttataacccgaattagatccttgtcttcggggaactcagttaaccaatcaagaataatatcgatgaccgcatcttcgttgacatctagatagtcgcagttcatgatattaaacatggaatcagttgaaattaattctttgaatctagtatccttccacaatgtttcaatatcattagcaattttttcctcgatcacagtcatgacatcgtatatatcttccatttccttaaatctattgctaaacaactcatacatctcaagagagtttctttcatctattatataatgaaagatacgaactgttgcatgtcccaagatctcagaatcaaggaagcgagcaagatcaaacatttcaactacatcttccaactcaagatcacccatgactcctgtgtatatgaaatcaatggccgtctcgataacaaaacctgaataatcaatattgaatattttttgatctggatcattacttagcatctcagcaaagtatgtagaaaatccagatacaaccaccttatgtgcgctaatgtcgttgttatcttttgtgtggaatgttatatcacaaaactttccagattttctaagatcattcatattgttagctagatcatatctatgtttcacacacaattctttctcatgttcgttaaggtcgtacccgcgaacaaaatagtaatcactcattctgacgacagcataaatagaaatagtttttctattttttatagagagtatctccctattacctcattatatgataatgtgttagatatttgaacttaacaatatcgtttataaaaaatcattcatgtgtctgtgtttggacgcttgtcatagactgtagtgagtagtcaatatcacatcctatgtaatcaatagcagtgttagtcgcataatatttcgtatacaagtcacgtatttctggtaggttcatgttggaaaatatctccataactaattcttttgggatggtattcaagtaagttggttgatcatggtctatgtagtagatgactttcctcataagattgcatttctctctaataccactaataacatctttcacgatatcgtgatatatgtttgattcggtaattaattctttatcatagttgccatacactggaatttttatattattatttaacaatatgttgtatatagttattccatacgttatatagatagattttaacgacatggcatcactattatagcgatacgcgttgtgtaaaacatttatatatttttctctgcttacatcatcgagaggatagttatcttcagcattataatatatattgttaatataactacattcgtagtcttcttcatcatcttcttcggtttcacgtactaaaatatcatccctctgttgtatcttaaattctatagcctccttgaacttggaatagaacgacggaaccattaatattagataactaatgacagttggactacattcccatacatctcttactttattcatgagaacacaatcaataatatggtccgtcaatggacctaagatttctttaggaggtaattgactaatgagaaaactagtccacttacgagcactatatacacgtaatgccaaatagaaaatagttttattattataagttcgtaacgtcatatcagctccattatcgagtaagtattttgcaatacgtatggtgttgtactttatggcataatgtaacggcgtataaccgtcataatatttattaatatcaaacccgtctagagatctaataatatctagacactctgtatctatatatgactttttaatgtagtcgtgtatgacagaatctctgaataattccggtttagcatgtttactaagtattaaaagtttacgtagtatctttatattttgtatattatcgatattattaatattatggatagccgtaatgacaggaattctgttacatgcattaggcataattatatctgctcctagttctataaatgtatctatgattgtttcattgtaaaaattgcttcttgtaaaaccatgtaagtaataatgtaacggtgttcccaacggagtattttcattcatggcgtttatatcgtttccattatacaccaataacttcatgtaattaggtgttattaaactttttaaaccagccaatacatgaagaggagtaccgtaaaagatacgcgttaatccattaaagtctccacaataataagttttaagacaatgtttgttagtcagaactaacttcttaaagaatggatagtcaaattttttatgatttaatagataaacatgaactaaagacgatctctggttcatagtaagataatcgtttagtatatcaatcatttctaaattcattatgtcccgtttaaaatatgcagatacggctgtattcagataataatccttgactgttaagtcatatccgttagcgaggaaatcttttacaatgttcatatctaaatcattttttctgatttcgtcagaatatcccaagatagaactattttttttatatctatcatcgacgacattagtttcttcccatgtttgagtagatgcgtctttagtagacagttctttatattctacatttggttcattacatattgtattgtagaaagataggtaatcgtcatattcgtttttatttgtagcgtttattgtgttgttttctggattctcaaagtattgagattcatgagacttcttgctagcaatataaaagtatttatgtaatgaatatctttccatctctacaaagtataatatatttgataaaaattcaataatctaccattggaacttcacatatccatcttctatctgcgtatattctagcagcactaattccgttgtcgttgagataagcatagtcttcaacacatctaatatgtataatattattatatggtttattatcacaattcaaccatggcgattgtgaattagtcctatatagcccaataatcaaatatacccttgtatctgtatatcttaggaaatgtgtcattaataatacatgctaaacgcccgttcatatttttacaatatttaaacgatgctgtccaattggtgatatattctgaaaagtaataacatatgttgtttataccaatggtgtttttaggacatatcttgtatcttgtttcttctttaaagcatctatgttcgatgaaacatataactaaaaatgaggatagtagagatagagataatataactatcacgacgcggtaaactaattcgcgcatgataaacaacattgttacattatatcatcattaattaatttatttttatttttatttttatttttattggtaatgccaggatgcttaataaaaatgtttaacgaacataatctgctttttaatcaagtcgtgattgttgtaataatctagatttatatctgtattaacgtcaaacaaacttaaatctattttaaagaagctgtacgtatacagtaacgtcttatcagacgtaagtacttgatctcccagatttatattcacgtactcctccattgtgtaaaattaatcatataagtaaataatcataaaatattatatcaattttattatatgaatgatagctatctaattaatagttctagtggcgcaagtatttggaggtataccgctaatatcgatcatgtttcctatatgaatagtagcagtatcctcttcaaatccctcatcggtattgacgtacacaatatagagatggagatctgatagacagttgcctattaaagtgaaattttcagcgtgggttgatgctgtttcaggaacacgtgtaaaattaccgattaatacaggttccgtttcagcgttacattttacttctacattcagcgtacacatcttggatgtattttgtttttttgtagtatctgtgaaaagtccggctacagcagttttatcctttatagaataatattctgttacaaagactggatcgcagtctgtactattaacagtaattgttaattcagaagtcgtgataatatcggatgattgttttgtacttagtcgattacaagatgatacgttaactggatatagttcaaaatctatagatatgtaattaaatgtatctgtaatgtatttgttttcgaagaaaccgggtggaggataatcatttgcaaacgatgcgacaaataatgatgcgaatattagtattgtgtttatgtttatgtttatcatgatgagtatttatgataacaaagttttgtattatccggagtggtacagcactgttcggttggttctattttctttgttgtggtatcaggagtacatcttgcacaactattgacggcaggcagcatacatttcaatcctggaccacattgacattttcgtggtttatccggaccacatgattgtatctctaccatattgcttaaacaagtaacacacgccttacataaaccatcttcaggttcaagatagtaatcattaggacacgttttaccaaatgatgtatatactaggcaggttacgatagcggataaaaagatagtattcatcttcatgctatttaatacatctaatatatgtattggtcattaaaaaatattattttatagaaactttgtgtatgtatccagaacaattttatcttgttacgcttcatctgtaagtcgagcattgataaatgcggcatgatgtctgttaaatattatttttttaaaataacttagtctaaatatcccgataatgcaactaaataaaagagtaacgggaatacacataacgggatacatatccatgatgtatcttgatatgtcattggctatataatacatagatcgcgcatctgttatgtacgtattaactatatcatataatggatcattgccatgacaacacgctactagattgtgattttccctatgtgtgattatgtcctctttgtaacatttactaactagtatatcgtatatactgatattagttctcgaattaatgtgtaacttggtcaatttatcgatgttatctctgatgctaactaacttatcaagcgccaaaaacattgcatgactattatcgagaatcgctatatccctctccatatactcgatgcatttattacagtaatccaatccagctaacataagagccaatctcaatgttggtttaatgatatcatcttcacttaataataacgatggaaactttccagtagcgtaacacttatctaagaagtatataactatgtctacattaggtctcttatcgagaatattcttaacaatataccattggtgacctgacaacgtattatttcccatggttaacattagagggtatacaccattttttgtcggtatattaatattggtttggatggataataagtacacacatgaatccatgacaatattggcattagtatgcgagataatagatacatgtaatggtgtcataccagacgtttcgcatactgcgttattatatctttctataatcgcacaatgatatacgtcatgtatatttgtactatcgtacggctcatattcatcagtatataagtcagtaggtatattatatttagcaataatatggtgaagaatgcatggagtatcgtctactctaattaatagatcttgaagtatacgattctttaccatattcaatactttatcagatatcaggcaatctattatgtcataatacatataattttgagcggtgcatatatatgaagttaatggagtataccctaaacaattgactgctgttatatccgcacccaaggatatcagacactgaataacatctagtcttatatcgttatcggtttctggatctaagatattaacaacagacaacatagagagatatgtgtgtagtaccgtattaccaatattgtcgggttcatttatatcattcccgtactcgtgtaaaagtttaatgatgctagtacttatgttgtgtcgcagaatatattgatgaagacaagtccttccagcactatctttataatgtagttttactcctggttgtaaaaaggagtacatgacagatatatcgatattccgagctagtgttatatacgaatgtagcatcataggtatattttttactttattgccatctagtgattctacgtacaagtttgttatttctggattaatattatctatattggctatgtatgtcataatcggactcattccattaacgcatttcatatccatgtctccaccgagttcgataatctttttaattacgtacgcacaaacatttcctgttatcgtgtacgtgtgcaacggagtaataagatcacgattctgcaaatttacatttactccgttattgcataaccactctaatatatctatatcaacatccatgttgccgagatacgcgtgtaggataccgtatcctgttttcttacatacataattaagatttacaattcctacatctaccatatatttaatcaagtctagttctatacttcggattttcggtgagttgaaatatgtatataaaatatccatatctccattgttgggaatatcaaacacatgattggcggttttacttttattatctttaatacatttgatgaaatttttatactgatcaaccaacgatttgttttttctgtctgtttttaatatcaaaatcatattactgataatattaatcaatgcggttttactatcggtatactgttcacgatatctattatcgataccataatatttctttttaaaaacttttatgcgtttggttataactgtgtgattataactgtatatatccccatcgctacagtatccatcatctggatcatcattatttatacgagcattggtgcttgtacggttatcaaaatcttcaaagtacatcgaatatatcagttttctgacattaactatagcgtgttcggtcaatgatgccattttgataactataatcaaaatctgtcagtgttggtagtacataaaaagtttatattattgttacatttttaaaaaagatcaatgcataaaaaaattagaagtgttagattatattaattatactataaaaattagaagtgttagactttaactatcttataacttataacttataacttataacttataacttataacttataacttataaaactattgactattaactatcttataactaacttataactaacttataactaatttataactattgactattaactatctttaacttataacgattgactattaactatcttataacttataactatcttataactatcttataactcttataactcttataacttataactattaactaacttataacatattaactcatttcaagaagggtggtgagagaactctatgataacttgtgaaacaattagatccctaatttctaatggtagttttgataggagattgtcatcagttgatacattgtttattatctcatctattagagcacgtctgtttagagctttagtgccatgctcgtttacttctgtgtaaatcttaaatcctttagtgatacactgtttcaaaactggatgtttagaatacctatgaagaatgtgggaagcatgcttcaacacattcaatattgtattgtattgttattgttattgttattgttattgttattgttattgttattgttatattatttacacaatagacaatgtattgtttatatactgaattaataatacaaaaattccaatcttgttattaaacgcacgccgagaaaaatagtataaacataaaataaaatccatcaaaatgtcgtttaaatatctgatgttgttcgctgctatgataatcggatcattcgccgataacgttaccgtcgaaacggcatcgccagaaattgcaaacactacaacagatattccagatgttatcgtattatgcggtccagagggagatggctattgtttacacggtgtctgtatccacgctagagatatcgatggtatgtattgtagatgcgatcatggttacacaggcattagatgtcagcatatagtatagtagactatcaacgttcagaaaaaccagacactacaacatcatatatcccatctcccggtattgtgcttgtattaataggcattattatgtgttgtctattatctgtttataggttcactcgaagaactaaactacctctacaagatatggttgttccataatttttataaaattttttatgagtatttttacaaaaatgcataaagtgtatgtcgtatgtatatttataaaaatgctatgctatgcaatgtatctgtattatttgtatttatctaaacaacactctacctctagatatgatacaaaaatttttttatttcagcatattaaagtaaaatctagtcaccttgaaattgaatacagtgggtggttccgtatcaccagtaagaacataatagtcgaatacagtatcagattgagattttgcatacaatactagtctagaaagaaatttgtaatcatcttctgtaacgggagtccatatgtctgtatcatcgtctagtttatcagtgtcccatgctatattcctgttatcatcattagttaatgaaaataactctcgtgcttcagaaaagtcaaatattgtatccatgcatacatcgccaaaactatcacttatacgtttatctttaacgatacctatacctagatggttatttactaacagacattttccagatctattgactataactcctatagtttccacatcaaccaagtaatgatcatctattgttatataacaataacataactcttttccatttttatcagtatgtatatctatatcaacgtcgtcgttgtagtgaatagtagtcattgatctattatatgaaacggatatatctagaacggcaattgtcttacgtccagttaacactttctttgatttaaagtctagagtctttgcaaacataatatccttatccgacgttatatttcctgtagggtggtataattttattttgcctccacatatcggagtttccaaatatattactagacaatattccatatagttattagttaagggtgcccaattagaccacgtacgcttattatcatcatttggatcgtatttcataaaagttattgtgttatcgatgtcaacacattctacattttttaatcgtctatatagtatttttctgatattttctataatatcagaattgtcttccataggaagttgtatactatcgaaatcagttacatgtttaaataattctctgatgtcattccttatacaatcaaattcattattaaacagtttaatagtctgtagacctttatcgtcgtaaatatccattgtcttattagttacgcttatttttatgtgtttttacgttgctttattatatttttataagaatgattgtttgactaataacgagaactattaagacacattattaggtatatatttataaaaaagtttttgattacgatgtcatacgcggaaagaggacacattaacatcatacatcaattaattacattcttataacatcgtaatcaaaagaattgcaattttgatgtataccaactgtcaatggattatggaattgtatattacacattataaggtatgatgtaacgacaattaccgatcggtatttgtctgccagtgtaatagaattatatattctattacaccggccttgtatacataataataagttgtggtagtatgatctccatatttataatttaggactttgtattcagtatttttggaatcataaaaaaataaaaaaagttttactaatttaaaatttaaaaagtatttacatttttttcactgtttagtcgcggatatggaattcgatcctgccaaaatcaatacatcatctatagatcatgtaacaatattacaatacatagatgaaccaaatgatataagactaccagtatgcattatccgaaatattaataacattacatatttcatcaatatcacaaaaataaatccagatctggctaatcaatttcgggcttggaaaaaacgtatcgccggaagggactatatgactaacttatctagagatacaggaatacaacaatcaaaacttactgaaactatacgtaactgtcaaaaaaatagaaacatatatggtctatatatacactacaatttagttattaatgtggttattgattggataaccgatgtgattgttcaatcaatattaagagggttggtaaattggtacatagctaataatacctataatccaaatacacccaatagtacaaccatttctgagttggatatcatcaaaatactggataaatacgaggacgtgtatagagtaagtaaagaaaaagaatgtggaatttgctatgaagttgtttactcaaaacgattagaaaacgatagatactttggtttattggattcgtgtaatcatatattttgcataacatgtatcaatatatggcatagaacacgaagagaaaccggtgcgtctgataattgtcctatatgccgtacccgttttagaaacataacaatgagcaagttctataagctagttaactaataaataaaaagtttaattatcgacgatgtatgtcgttatttttctcatatgaaagattaatttgattctaatataatcttcagtattggatgaatctcaattcaaattaattccattagattatatcataaataaaaatagtatcatgtgctacttcagccaaatattctttttttgaaacgccatctagcgtagtgaggacacaagtgaacctataatgagcaaatttattagtatcggttacatgaaggactttacgtagagtggttgttccaccatctgtggtacgaacggtttcatcttcgttgatgccatcgcccagatgttctataaacttggtatcctcgtccgatttcatatcctttgccaaccaatacatatagctaaactcaggcatatgttccacacatcctgaacaatgaaattctccagaagatgttacaatgtctagatttggacatttggtttcaaccgcgttaacatatgagtgaacacacccatacatgaaagcgatgagaaataggattctcatcttgccaaaatatcactagaaaaaatttatttatcaattttaaaggcataaaaaatacttattgttgctcgaatattttgtatttgatggtatacggaagattagaaatgtaggtattatcatcaactgattctatgatggttttatgaattttattatgcttcactattgcatcggaaataatatcatatgcttccacgtatattttattttgttttgactcataatactcacgtaattctggattattggcatatcgataaataattttagctccatgctcagtaaatattaatgagaacatagtgttgcctcctaccattattttttcatctcattcaattcttgattgcagagatctatataatcattatagcgttgacttatggactctggaatcttagacgatgtacagtcatctataatcatggcataatacattgttttatagcataggcattatctacgatattagatatttcactcaatgaatcaatcacacaatctaatgtaggtttgacataatagcattttcagcagttcaatgtttctagattcgttgatggcaatggctatacatgtatatccgttatttgatctaatgttgacatctgaaccggattctagcagtaaagatactgattgtttattatatctaacagccttgtgaagaagtgtttctcctcgtttgtcaatcatgttaatgtctttaagataaggtaggcaaatgtttatagtactaagaattggtcaatcatacgacctgtcgcgaagaccctttctgtatgcattagtgtagaaattataacatccatagttggatttacataagtgtccaatcgggatctctccatcattgagaggattgacagcatctccccttccttttttagtagatatttcatcgtgtaagaatcaatattaacatttctaaagtatccgtgtatagcctctttatttacaacagctccatattccaacatgcattccaatagagagatatcgatatcgctgaatgttatatactcaattagtatatgttggaggacatccgttcattgttttcaatatcaaagagatggtttccttatcctttctccatagtggtacaatacctacacattattccgtgcggctttccattttccaaaaacaatttgaccaaatctaaatctacatctttattgtatctataatcactatttagataatcggccatgattcctcgagtgcagcatgttagatcgtctatatatatatgcataagcagtgttatctattcctttcattaacagtttaacgatgtctatatctatatgagatgacttaatataatattgaagagctgtacaatagtttttatctctagaagatgggttgattccatgattaatcagacatttaacaacttccgggcacacatgatctcgaatccgactctgaatagagcattattcttgaattggttcctggtatcattaggatccctgtctttcaacatctgtttaagtttatcgagaaccacctcctcattttccagatagtcaaacattttgactgaatagaagtgaatgagctactatgaactctatacacccacacaactaatgtcattaaatatcatttttgaatgtatttataccaggtcaaaaaacttgtacaattattaataaaaataatttagtgtttaaattttaccagttccagattttacacctccgttaactccactttttacaccactggacgatcctcctccccacattccaccaccagatgtataagttttagatcctttattactaccatcatgtccatggataaagacactccacatgccgccactactaccccctttagaagacatattaataagacttgagttaagacaagtttaacaataaattaatcacgagcaccctactaccaacctacactattcatgattatagtttctattttttacagtatattgactaaagtctctagtcacaagagcaatactaccaacctacactattatatgattatagtttctatttttataggaacgcgtgcgagaaaatcaaatgtctaagttctaaattctaacggtagtgttgataaacgattgttatccgcggatacctcatctatcagttgtctattttcttactttgttttattaacttattagtattatatattatttgattataaaacttatattgcttgttagtccaatctgtaaatatcgtttctttgtatgtttatttaacttgtacatcactgtaagcatgtccatgccatttattttaacttgacgcatatccgcaatttctttttcgcagtcggttatatattctatataagatagatacgtatcacatgtgtacttatagtcgactaatatgaagtatttaatacaagtttctagtatacgtttgttacgaatgttcgcggagtatagcctattattttctaaataacaaactgttttctttatatattcgatggttggtaatttactcagaataatttccaatatcttaatatataattctgctatttctgggatatatttatctgccatcataacacaaatactaatacatgtagacccatatgttgttatattaatatctgcgccattatctattaaccattctactagggcaacactatgcgactcgatacaataataaagtatgctacgtccatgtttatctattttgtttatatcatcgatatacggcttacaaagttttagtattgataatacatctaacgcacgaatcgagaaggtagggaataatggcataatatttattatgttatcattatcattacgatatgtcagaagataatgaatatctgtacgcttcttcttgtactgtaacttctggttttgttagatggttgcatcgtgctttaacgtcaatggtacaaattttatcctcgctttgtgtatcatattcgtctctagtataaaattctatattcagattatcatgagatgtgtatacgctaacggtatcaataaacggatcacgccatttagtcataacagtaatccaaaattttttaaagtatattttaacgaaagaagttgtatcatcgttaggatttggaaaatcttgtctacagtgtatggcacgagatcctcataagtgtatatgtctaaagtgatgtttaatttatcaaatggttgataatatggatcgacagaacgacaatttccgaagacggaaataagatatagacatgcaataaatctaatagcggacatggctacctccttaaaaaatacgaactctttggctatttagtaattggcacttaacaatgctccattaatccatggactcataatctctatatggaattagtggatgttctatatacggggatgagtagttctcttctttaactttataatctttattaatcatatttagtctgatgtatgggtaatagtgtttgaagagctcgttctcatcatcagaataaatcaatatctctgtttttttgttatagagatgtatcacggcctcatatattacgtaatagaacgtgtcatctaccttattaactttcacggcatagttatttgagaatactgtcaatcctttgacctcgttgatttccgaccaatctgggcgtataatgaatctgaactttaatttcttgtaatcattcgaaataatttttagtttacatccgtagttatctcctctacgtaactgtaaatttctcaatgcgatatctccattaatgacgatgtcgaattcgtgttgtatacccatactggatggatgaacgaataccaacggcaccaatagtaatttactttttcatctttacatacttggtactagttttactatcataagtttataaattccacaagctactatggaatacgccaaccatcttattatagcacgcatgtcttaaagtttattaattatatgttattttatatatcgctacgaatttaaacagagaaatccgttaggaagaaaaaaattatctatctacatcgtcgtctattagataatgtctctgtattctacgatagagtgctactttaagatgcaacagatccatgtcatcgaatatatactccattaaaatgattattccggcagcgaacttgatattggatatatcacgacctttgttaatatcaacgacaatagacaatagtcccatggttccataaacagtgagtttatctttctttgaagcgatattttgtagagatcttataaaactgtcgaatgacatcgcatttatttctttagctaattcatatatgtcgccatcgcaatatctaacagcatctatcttaaacgtttccattgctttaaagacgtttccgatagatggtctcgtttcatcagtcatactgagccaacaaatgtaatcgtgtataacatctttgatagaatcagactctaaagaaaacgaatcggctttattatacgcattcatgataaacttaaacaatgaaaaatgtttttcgttgtttaagtttattgagtagtatatcttaataattgttattatttcactaatttaatatgtagtaatgagtacctctataaaaactatatacgaatgacataactatcatactagtatcaaagaatgtctaggacgcttaattttcatatgattagattcccctgtatgtgttgtctgtattctgaagctattttctctatcgcattagtgagttcagagtatgtataaagttaaatcgaataacgaacataactttagtaaagtagtgtctataactcttttattttttagccatcataataccatgtttaagatagtattctctagttactacgatctcattgttgtctagaatatcacatacactgaatctacatccaatttctaaaattggtctgtgttaaatcccttctatattattattgatgtattgttgtagaaaactattacttagaccattttctttataaaacgaatatatagtaatccaattatctttaccgatatatttgcacacataatccattctctcaatcactacatctttaagattttggttgttaagatatttggctaaactatataattctattagatcatcaacagaatcagtatatatttttctagatccaaagatgaactctttggcgtcctctataatattatcagaaaagatattttcgtgttttagtttatcaagatctaacctgttcatatccatgattaacgacgttacaataaccgcgtaaaataaaaatccattttcattttttaacacaatactattcataattgagattgatgtaatactttgttactttgaacgtaaagacagtacatggatccgtatctccgacaagcacgtagtaatcaaattttgtgttgttaaattttgcaatattcatcaatttagatagaaacttatactcttcatctgttttaggaatccatgtattaccactttccaacttatcattatcccaggctatatttttgtccatcatcattgcgcagagtgaataattcttctgtatccgacagttcaaatatatgatccatgcatagatcggcaaagctattgtagatgtgatttttcctaaatctagtataacactcgtttactatgaaacactttcctgatttatcgaccaagacacacatggtttctaaatctatcaagtggtggggatccatagttatgacacagtaacatagattattaccttcttgacggtcgcaaatatctatatacttattgttatcgtatcggattctacatatagatggcgtgtatatcaaagatatagaacacataaccaataaaccattgtataatttttatgttttatgtttattcgcgtacacattttggaagtttcggctgccatgtattttccggagagcaagtagatgatgaggaaccagatagtttatatccgtacttgcacttaaagtctacattgtcgttgtatgagtatgatcttttaaacccgctagacaagtatccgtttgatattgtaggatgtggacatttaacaatctgacacgtgggtggatcggaccattctcctcctgaacacaggacaccagagttaccaaccaatgaatatccactattgcaactatacgttacaacgcttccttcggtataaaaatcctcgtatccgttatgtcttccgttggatatagatggaggggattggcatttaacagattcgcaaatgggtgcctcgggattccataccatagatccagtagatcctagttcacaatacgatttagattctccgatcaactgatatccgctattgcaagagtacgttatactagagccaaagtctgttccaccaatatcaagttgaccattatcgatatctcgaggtgatggacatctccgtttaatacattgattaaagagtgtccatccattgcctgtgcatttaacatatatggatcccattttttgctttctgtatccaggtagacatacatattctatagtgtctcctactttgtaagtatcatcagtccccacattattcttaaatttcatattaatgggacgtgacggaatagtacagcatgatagcacgcatcctattcccaacaatgtcagaaacgtcacgctctccaccttcatatttatttatccgtaaaaatgttatcctatgcattgtccaataataaaagtcatgctattgtaggaattttttttcacagttgctcaaaaacgatggtagtgacttatgagttacattacattttggagtctcatctttagtaaacatatcataatattcgatattacgagttgacgtatctaacaaattccaagtatttgattttggataatattcgtattttgcatctgctataattaagatataatcaccacaagaacacacgaacatctttcctacatggttaaagtacatgtataattctatccatttgtcttcattaactatatatttgtatagataattacgagtctcatgagtaattccagtaattgcatagatgtcaccatcgtactctacagcataaactatactatgatgtctaggcatgggagacttttttatccaacgatttttagtgaaacattccacatcatttaatactacatatttctcatacgtggtataaactccacccattacatatatatcatcgtttacgaataccgatgctcctgaatatctaggagtaattaagtttggaagtcttatccatttcgaagcgccatgtttcaaatattctgctacagccgttgaaatagaaaattctaatcctcctattacatataactttccattgttaacacaagtactaacttctgattttaacgacgacatattagtgaccgttttccattttttcgttttaagatctacccgcgatacggaataaacatgtctattgttaatcatgccgccaataatgtatagacaattatgtaaaacatttgcattatagaattgtctatctgtattaccgactatcgtccaatattctgttctaggagagtaatgggttattgtggatatataatcagagtttttaatgactactatattatgttttataccatttcgtgtcacaggctttgtagatttggatatagttaatcccaacaatgctatagcattgcgcatagcattagtcataaacttgggatgtaaaatgttgatgatatctacatcgtttggatttttatgtatccactttaataatattatagctgtaacatcctcatgatttacgttaacgttttcgtgggataagatagttgttagttcatcctttgataattttccaaattctggatcggatgtcaccgctgtaatattgttgattatttctgacatcgacgcattatatagttttttaattccatatcttttagaaaagttaaacatccttatacaatttgtggaattaatattatgaatcatagtttttacacatagatctactacaggcggaacatcaattattatggcagcaactagtatcatttctacattgtttatggtgatgtttatcttcttccagcgcatatagtctaatagcgattcaaacgcgtgatagtttataccattcaatataatcgcttcatcctttagatggtgatcctgaatgcgtttaaacaaattatacggagacgccgtaataatttccttattcacttgtataatttccccattgatagaaaatatcacgctttccattcttgaagtactatagtaattatagtataatgtaaaggtttatatattcaatatttttataaaaatcatttcgacattaattcctttttaaatttgtctatcatctatagaaacatattctatgaatttataaaatgcttttacgtgtcctatcaaatttctacaaaagaatctgttatatggtatagggagagtataaaacattaaatgcccgtacttattaaagtattcagtagccaatcctaactctttcgaatacttattaattgctcttattctgtacgaatctatttttttgaacaacggacctagttgtatatcttgttctatatatctaaaataatgtctgacaagatccattagtttaatatcctcagtcatcttgtctagaatggcgtatctaactgcgggtttaggctttagtttctgtttctatatctacatctttacccaacaccaaaaatataatagctaatattttattacaatatcacgaactaatgtttctttggttatctagtatagtcacgatcagacaaataaataaaatcagatgatcgatgaataatacatttaaattcatcatctgtaagatttttgagatgtctcattaaaatattattagggtcagtactcattatcatatattggcagcagctattacttattttatttttctgtattttattatttttcaccatatagatcaatcattagatcatcaaaatacttttcaatcatcctaaagagtatggcgaacgaatcttcccatctaatttctgaacgtctaccaatgtctctagccactttggcactaatagcgatcattcgcttaacatcttctacattattaactggttgattcaatctatctagcaatggaccgtcggatagcgtcattctcattttcttaatcaatgtatatacatcgtcatcatctaccaattcatcaaacaacataagctttttaaaatcatcattataataggatggatcgccgtcatttctccaaagaatatatctgataagtagagtcctcatgtttagtaatttaactattttagttaacaactatttttatgttaaatcaattagtacaccgctatgtttaatatttattcatattttagtttttaggattgagaatcaatacaaaaattaatacatcatcaattttggaaatacttagtttctacgtagtcaatgaaacatttgagctcatcgtaaaggacgttctcgtacaggacgtaactataaattggtttatatttgttcaagatagatacaaatccgataacttttttgacgaattctacgggatccactttaaaagtgtcataccgggttctttttattcttttaaacagatcgattgtgtgatgtttattaggtcttttacgaatttgatacagaatagcgtttacgtatccaccatagtgatcaatagccatttgttcgtatgtcataaattctttaattatatgacactgtgtattatttagttcgtccttgttcatcattaggaatctatccaatatggcaattatattagaactgtaactgcgttgtgtgcacatgttgatgtgtctgtttatacaatcaattatactaggatccatgccactaccttcgggtaaaattgtagcatcatataccatttctagtactttaggttcattgttatccattgcagaggacgtcatgatcgaatcctaaaaaatatattatttttatgttattttgttaaaaaataatcatcgaatacttcgtaagatactccttcatgaacataatcagttacgaatcgtttatatgaagtaaagtatctacgatttttacaaaagtcaggatgcataagtacaaagtacgcgataaacggaataataatagatttatctagtttatctttttctatcgctttcatagttagatacatagtctcagaagtaggattatgtaacatcagcttcgataaaatgactgggttatttagtctcacacattcgctcatacatgtatgaccattaactacagagtctacactaaaatgattgaacaatagatagtctaccattgtttcgtattcagatagtacagcgtagtacatggcatcttcacaaattatatcattgtctaatagatatttgacgcatcttatggatcccacttcaacagccatcttaaaatcggtagaatcatattgctttcctttatcattaataatttctagaacatcatctctatcataaaagatacaaatattaactgtttgatccgtaataacattgctagccgatagcaatttgttaataagatgcgctgggctcaatgtcttaataagaagtgtaagaggactatctccgaatgtgttttgtttattaacatccgttgatggaagtaaaagatttataatatctacattcttgactgatttagagcatacaatatggagaggtgtatttccatcatgatccgtttttgagggactaattcctagtttcatcatccatgagattgtagaagcttttggattgtctgacataagatgtctatgaatatgatttttaccaaatttatccactattctggcttcgaatccgatagacattatttttttgaacactttttctgaaggatctgtacacgccaacaacggaccacatccttcttcatcaaccgagttgttaatcttggctccatactgtaccaataaatttattctctctatgacttcatcatctgttcccgagagataatatagaggtgttttattctgtttatcgcacgcgtttggatctgcaccgtgtgtcagcagcgttgcaactattctattattattaattttagaagctatatgcaatggataatttccatcatcgtccgtctcatttggcgagtatcctctatgaagaagttcttcaacaaatcgttcatctagtcctttaattccacaatacgcatgtagaatgtgataatttccagaaggttcgattgttcgcagcatattcctaaatacatctaaatttttactattatacttggcataaagatatagataatactcgtctgatataattttgtccattgtagtataaaaattaatatttctatttctgtatatttgcgacaatttactctctataacaaatatcataacttagttcttttatgtcaagaaggcactggtttagttcatctataaatgtcacaccataactaccacgcatgtcatactcagaattatgataaagatatttatccttgggtgcaggtaatggggattaatctttgttggatcagtctctaagttaacacacgtcacacatgatccatttatagttatatcacacgatgatgatttatgaattgattccggaagatcgctatcgcattttgtggttccacaattcatttccatacatgttattgtcacactaatattatgatgaactttatctagtcgctgagtggtaaacaacagaacagatagtttattatcttttccaactccctcagccgccgccacaaatctctgatccgtatccatgatggtcatgtttatttctagtccgtatcctgtcaacactatgttagcatttctgtcgaaatagttttcattcatatgacactcgcccataatagtagaactaatgttgtaatttacaccaatagcgacttcggctgcaaagtaccaaataccggtaatcttgtcgaggaggacacgccgtgttcttgtattctgtcgaatacccgagagatacgatacaaaagagtaagactaatttgtaaaccatcttacacaaaatatgtaacaatagtactatgtaatcaatgagtaataaaacaataggaaccctctatacacgtaattattctatcaattttaccaattagttagtgtagtgttttaacaaaaatgtgggagaatctaattagtttttcttacacaattgacgtacattagtctgagttccttgtttttgctaattatttcatccaatttattattcttgacgatatcgagatcttttgtataggagtcagacttgtattcaacatgcttttctataatcatcttagttatttcggcatcatccaatagtacattttccagattaacagagtagatattaatgtcgtatttgaacagagcctgtagtatttccaggtctttgttatctatagccaatttgatgtcgggaatgaagagaagggaattgttagtgttggtagatgccatatagtcgatcaagagaatcatcatatccacgtgtccattttttatagtgatatggatacaactaaggagaatagctagatcaaaagtagatggtatctctgaaagaaagtatgatacaatacttacatcattaagcatgacggtatgataaaatgaagttttccatccagttttcccatagaacatcagtctccaatttttcttaacaaacagtttcaccgtttgcatgttaccactatcaaccgcataatacaatgcggtgtttcctttgtcatcaaattgtgaatcatccattccactgaatagcaaaatctttactattttggtatcttctaatgtggctgcctgatgtaatggaaattcattctctagaagatttttcaatgctccagtgttcaacaacgtacatactagacgcacgttattatcagctattgcataatacaaggcactatgtccatggacatccgccttaaatgcatctttgctagagagaaagcttttcagctgcttggacttccaagtattaattcgtgacagatccatgtctgaaacgagacgctaattagtgtatatgttttcattttttataattttgtcatattgcaccagaattaataatctctaatagatctgattagtagatatatggctatcgcaaaacaacatatacacttaataaaaataatattcattaaggagattcagattccaccgtacccatcaatataaataaaataatgattcattaccttacccatataaacaatattaaggagattccaccttacccataaacaatataaatccagtaatatcatgtctaatgatgaacacaaatggtgtattaaattccagttctgtaggagatgatctcgccgtagataccatgatagtagatgcctccgctacagttccttgttcgtcgacgtctatctttgcattctgaaacattttatagatatataacgggtccctagtcatatgtttaaacgacgccttatctggattaaacataccaggagcaatcatttcggctatcgacttaatatccctcttattttcgatagaaaatctagggagtttaagattgtacattttattccctaattgagacgaccaatagtctaattttgcagccgtgatagaatctgtgaaatgggtcatattatcacctattgctaggtacatactaatattagtatccttatacggaaggcgcgccatatcatattcttcgtcatcgaccgtgattgtatttccttgcaatttagtaactacgttcatcatgggaaccgttttcgtaccgtacttattagtaaaactagcattgtgtgttttagcgatatcaaacggacattgccacgtacctttaaaatatatagtattaatgattgtccatagagtattatcatcaagcatagtagaatcaactacattagacataccggatctacgttctactatggaattaattttatcaaccggatctcgtctaaagtttaatctatatagaccgaatctatgatattgttgataatacgacggtttaatacacacagtattatctacgaaactttgataagttagatcagtgtacgtatatttagatgttttcagcgtagctaatcctgatattaattctgtaaatgctggacccagatccctttttctcaaatccatagtcttcaatagttctactctagtattacctgatgcaggcaatagcgacataaacatagaaaatgaatagccaaatggcgagaagacaatattatcatcctcattcccatcttgaatatttttatacgctaatataccggcattggtaaatccttgtaggcgataggcggatgctgtacacgctaacgataatatcaataacgcaatcatgattttatggtattaatactttaccttatttttatgtttggtataaaaattattgatgactgtacatccttttgtataatcaagtctaagtactttaacttttacagtttttcctaagtttatccctatattcaacatatctatccatatgcatcttaacactctctgccaagatagcttcagagtgaggatagtcaaaaaagataaatatatagagcataatcattcttgtatactctgccctttattacatcgcccgcattgggcaacgaataacaaaatgcaagcatcttgttaacgggctcgtaaattgggataaacttatgtttttatatctattttattcaagagaatattcgggaatttctttttctggttgtatgtcttcaccgtagatatcatttgtacactgtttcatattttttaatagtctacatcttttagtaggactagtatcgtataattcatagctgtattttgaattccaatcacgaataaaaatatcttccaattgttggcgaagacctaatccatcatctggtgtaatattaatagatgctccacatatatccgtaaagtaatttcctgtccaatttgaggtacctatatacgccgttttatcggttaccatatatttggcatggtttactctagaatatggaatgggaggatcggcatccggtacaataaacagttttacatctatatctatgtttttagattttagcatagctatagatcttaaaaagtttctcataataaacgaagatcgttgccagcaactaatcaatagcttaactgacacttgtctgtctatagcggctcttcttaattcatcttctatataataccaaaacaaaattttacccgccttcgaataaataataggaataaagttcataacagatacataaacgaatttactcgcatttctgatacatgacaataaagcggttaaatcattggttctttccatagtacatagttgttgcggtgcagaagcaataaatacagagtgtggaacaccacttacgttcatactaagaggatgatctgtattatatataatacgcaggataaaagtttctccaattatatggtagattgttaactccaagataccagtatacctcaaaaatttgagtgagatccgctgccaagttcctattattgaagatcgcaatacccaattccttgacctgagttagtgatctccaatccatgttagcgcttcctaaataaatatgtgtattatcagatatccaaaattttgtatgaagaactcctcctaggatatttgtaatatctatgtatcgtacttcaactccggccatttgtagtgtttcaacatcctttaatggtttgttggatttattgacggctactctaacacgtactcctcttttgggtaattgtacaatctcgtttaatattatcgtgccgaaattcgtacccacttcatcagataaactccaataaaaagatgatatatctagtgtttttgtggtattggatagaatttccctccacacgttaaatgtagacaaatatactttatcaaattgcatacctataggaatagtctctgtaatcactgcgatggtattatccggattcattttatttgttaaaaaataatcttataactttactctattaaaaatccaagtttctatttctttcatgactgattttttaacttcgtccgtttccttatgaagatgatgtttggcaccttcataaatttttatttctctattacaatttgcatgttgcatgaaataatatgcacctgaaacatcgctaatctcattgtttgttccctggagtatgagagtcggggtgttaatcttgggaattatttttctaaccttgttggtagccttcaagacctgactagcaaatccagccttaattttttcatgattgactaatgggtcgtattggtatttataaacttcatccttatctctagatactgattctggacatagctttccgactgacacatttggtgtgatggttcccataagtttggcagctagcagattcagtcttggaacagcgtctgcattaactagaggagacattagaatcattgctgtaaacaagtttggattctcgtaagcggccagtatagaaattgttgctcccatggaatgacccaataagaagactggaactcctggataagtagatttaatagtcaccacgtgttgtaccacatctctaacatacgtaccaaagtcatcgatcatcattttttcaccattacttcttccatgtccaatatgatcatgtgaaaatactaaaattcctaacgatgatatattttcagctagttcatcataacgtccagaatgttcaccagctccatggcttatgaataccaatgccttaggatatgtaataggtttccaatatttacaatatatgtaatcattgtccagattgaacatacagtttgcactcataattcacgttatataactatcaatattaacagttcgtttgatgatcatattatttttatgttttattgataattgtaaaaacatacaattaaatcaatatagaggaaggagacggtactgtcttttgtgagatagtcatggagactacatcagattacgaggatgtcgtttttactttgtggatgatgaactatgtagccgtgactccatcatcgatctaatagatgaatatatcacgtggagaaatcatgttatagtgtttaacaaagatattaccagttgtggaagactgtacaaggaattgatgaagttcgatgatgttgctatacggtactatggaattgataaaattaatgagattatcgaggctatgagcgaaggagaccactacatcaatcttacagaagtccatgatcaggaaagtctattcgctaccataggaatatgtgctaaaatcactgaacattgggatacaaaaagatttcagaatctagcttccaatcattgggaaacattacagatctgatgaccgacgataatataaacatcttgatattttttttctagaaaaaaattgaattgatgatatcggattcttcataacgcataaattattacgttaatgtattctatatccagtgttaaaaaaattatcatatcatgtatttgagagtcttatatgtagcaaacatgataacagcaatacccataagctttagatattcacgcgtgctagtggttgcattatctctcggtgtggaaaaaatgtccgttatataatctacaaaataatcatcgcatatagtatgcgatagtagagtaaacatttttatagtttctactggattcatacatcgtctacccagtttggttatgaatgaaattgttatcaatcttacacccaaccccttgttatccattagtatagtattaactttgttatttatgtcataaactgtaaatgattctgtagatgctgcaatatcatcacacatgatatttatgtccctactataatcattattaactttatcacaatacatgttgataatatctatgtatgatctagtttttgtgggcaactgtctatacaagtcgtctaaacgttgtttacccatatagtattgaacagccatcattacatggtcccgttccgttgatagataatcgagtatgttagtggacttgtcaaatctatataccatattttctggaagtggatatacatagttgtgatcatcattatcgctagccttatcctctatatcctgtactataccattatctatatcctgtactataccattatctatatcctgtactataccattatctatatcctgtactataccattatctatatcctgtactataccattatctatatcctgtactataccattatctatatcctgtactataccattatctatatcctgtactataccattatctatatcctgtactataccattatctatatcctgtactataccattatctatatcctgtactataccattatctatatcctgtactataccattatctatatcctgtactataccattatctatatcctgtactataccattatctatatcctgtactataccattatctatatcctgtactataccattatctatatcctgtactataccattatctatatcctgtactataccattatctatatcctgtactataccattatctatatcctgtactataccattatctatatcctgtactataccattatctatatcctgtactataccattatctatatcctgtactataccattatctatatcctgtactataccattatctatatcctgtactataccattatctatatcctgtactataccattatctatatcctgtactataccattatctatatcctgtactataccattatctatatcctgtactataccattatctatatcctgtactataccattatctacgatattatacataaacatcgacaaaatactattgtccattatctaagtccagttgatccaaatccttgagctcctctatctgtactatctagagattgtacttcttccagttctggataatatatacgttgatagattagctgagctattctatctcccgtatttacattgaaagtacattttccattattaataagaatgactcctatgtttcccctataatcttcgtctattacaccgcctcctatatcaataccttttagggacagaccagacctaggagctattctaccatagcagaacttaggcatggacatactaatatctgtcttaattaactgtctttctcccggagggatagtataatcgtaagcgctatacaaatcatatccagcggcgtgatttgattgcctagtaggagatttagctctgttagtttccttaacaaatctaactggtgagttaatattcatgttgaacataaaaatattattttatttcaaaattatttaccatcttatcccattccatatattccatgaataagtgcgattattgtacacttctatagtatctatatacgatccacgataaaatcctcctatcaatagcagtttattatccactatgatcaattctggattatccctcggataaataggatcatctatcagagtccatgtattgctggatccacaataaaattcagcatttctaccaaccaagaataaccttctaccgaacactaacgcgcatgatttataatgaggataataagttgatggtccaaactgccactgattatgattgggtagcaaatattctgtagttgtatccgtttcagaatgtcctcctattacgtatataacattgtttatagacgcgatcgctggattatatctaggtttcagaagactcggcatattaacccaagaagtatctccgtggaaccaacactcgacagatgtgggatttggtagacctcctactacgtataatttattgttagcagctaccccgctagcatacagtctgggactattcatcggaggaattggaatccaattgtttgatgtacaatttaacgctatagcattgttatgtatttcattgttcatccatccaccgatgagatatactacttctccaacatgagtacttgtacacatatggaatatatctataatttgatccatgttcatatgatactctatgaatggatacttgtatgatttgcgtggttgtttatcacaatgaaatattttggtacagtctagtatccattttacattatttatacctctgggagaaagataatttgacctgattacatttttgataaggagtagcaaatttcctaatcgatttcttcgcttcatataccacttaatgacaaaatcaactacataatcctcatctggaacatttagttcattgctttctagaataagtttcatagatagataatcaaaattgtctatgatgtcatcttccagttccaaaaagtgtttggtaataaagtctttagtatgacataagagattggatagtccgtattctatacccatcatgtaacactcgacacaatattcctttctaaaatctcgtatgataaagtttatacaagtgtagatgataaattctacagaggttaatatagaagcacgtaataaattgacaacgttatgactatctatatatacctttccagtatatgagtaaataactatagaagttaggctgtgaatgtcaaggtctagacaaacccttgtaactggatctttattttttgtgtatttttgacgtaaatgtgtgcgaaagtaaggagacaactttttcaatatcgtagaattgactattatattgcctcctatagcctcaataattgttttgaatttcttagtcatagacaatgctaatatattcttacagtacacagtattgacaaatatcggcatttatgtttctttaaaagtcaacatctaaagaaaaatgattgtcttcttgagacataactcccattttttggtattcacccacacgtttttcgaaaaaattagtctttccttccaatgatatattttccatgaaatcaaacggattggtaacattataaatttttttaaatcccaattcagaaatcaatctatctgcgatgaattctatatatgttttcatcatttcacaattcattcctataagtttaactggaagagccacagtaagaaattcttgttcaatagagaccgcgtctgttataatagatcttactgtttcttcactcggtggatacaataaatgtttaaacatcaaacatgcgaaatcgcagtgcagaccctcatctctactaattaattcgttggaaaacgtgagtccgggcattaggccacgctttttaagccaaaatatagacgcaaatgatccagaaaagaagattccttctactgccgcaaaggcaataagtctctctccataaccggcactgtcatgtatccacttttgagcccaatcggccttcttttttacacaaggcatcgtttctatggcattaaagagatagtttttttcattactatctttaacatatgtatcgatcaaaagactatacatttctgaatgaatgttttcaatggccatctgaaatccgtagaaacatctggcctcggtaacctgtacttctgtacaaaatcgttcagctaaattttcgttcactattccgtcactggctgcaaaaaacgccaatacatgttttataaaatatttttcgtccggtgttaatttattccaatcattgatatctttagatatatctacttcttctaccgtccaaaatgatgcttctgcctttttatacatattccagatatcatgatattgaattgggaaaataacaaatctatttggatttggtgcaaggatcggttccataactaaattaacaaatagtagtattttttttcagttatcatctatatgactgtatttggatcttttgtacatcgctatcgccgcaatcactacaataattacaattattattgatagcattgttattagtactatcataattaaattatcgatgtccatgggtgaggaataatcgttatcatcattatcattttgtaattgtgacatcatgctagataaatcatttgtgagattgttgtgggaagggcatggaggatgtattatcgttattatttaacgcctcccattctgattcacaaatatgacgcgcgttcaacattttatggaaacgataattttgtgaaaacaagcaacaagaaaactcgtcatcgttcaaattttaacgatagtaaaccgattaaacgtcgagctaatttctaacgctagcgactctgttggatatgggtttccagatatatatcttttcagctcccctacgtaccacctataatcatctgtaggaaaatggaaggtatgtacatctatctactgttcctaatatcatatatggtggtgtagtagaaccattaagcacgaaagattttatttcgcatcgtattttaacttcgcaataatttctggttagataacgcactctaccagtcaagtcaatgatattagcctttacagatatattcatagtagtcgtaacgatgactccatcttttagatgcgatactcctttgtataaccagaatctttgtatctcagactcgatatatttaaacaagttaatgagatatttactcgttttatgaacgtcgatatatatccagaagttctatcctctgtggctagcgctataaccttatcattataataccaaaagtgtgattagtatgtgatacgtcagtgtgggtacaaatatgtacattatcgtctacgtcgtactcgatgcatccgcatacacccaataaatataaaatgataaatgttctaacaacgctcgtacccatcttgatgcggcttaataagtgttttgatttcaatttattgtaaaaaaagaatcggttttatactgttctagattctcattgattatattctcatctatcatctccacacagtcaaatccgtggttagcatgcacctcatcaaccggtaaaagactatcggactcttctatcattataactcgagaatatctaattcggtcattattaatcaagtcaattatcttatttttaacaaatgtgagtattttactcatttttataaaaaaatttagaaatatacagactctatcgcgtgtctatatcttctttttatatccaatgtatttatgtctgatttttcttcatttatcatatataatggtccaaattctacacgtgtgttgaattcatccagatcattaaggttcttataatcgtaacatccttctcctccctcttctacatcttccttcttattcttattcttattcttagcgtcacggaatctaccacagcaggatcccatgacgagcgtcatattaaactaattcattttcaattataaaatatactgattagtaatgaccattaaaataaatattcttcataaccggtaagaaagtgaaaagttcacattgaaactatgtctatacatcatgaaatgatgatatatatattctattttggtggaggattatatgatataattcgtggataatcattcttaagacacatttcttcattcgtaaatcttttcacgttaagtgagtgtccatattttgcaatttcttcatatgatggcggtgtacgtggacgctgctgttcctgttcttgttgtggccgcctactgtcgtgtttgcgtttagatccctccattatcgcgattgcatagatggagtactattttataccttgtaattaaaattttattaattaaacgtataaaaacgttccgtatctgtatttaagagccagatttcgtctaatagaacaaatagctacagtaaaaataactagaataatcgctacacccactagaaaccacggatcgtaatacggcaatcggttttcgataataggtggaacgtatattttatttaaggacttaacaattgtctgtaaaccacaatttgcgtccgccgatcctgtattaactatctgtaaaagcatatgttggccgggcggagccgaacattctccaatattcaatttttgtatatctataatgttattaacctccgcatacgcattacagttcttttctagcttggatactgcactaggtacatcatctagatctattcctatttcctcagcgatagctcttctatccttttccggaagcaatgaaatcacttcaataaatgattcaaccatgagtgtgaaactaagtcgagaattactcatgcatttgttagttattcggagcgcgcaatttttaaactgtcctataacctctcctatatggatagcacaagtgacattagtagggatagaatgttgagctaatttttgtaaataactatctataaaaagattatacaaagttttaaactctttagtttccgccatttatccagtctgagaaaatgtctctcataataaatttttccaagaaactaattgggtgaagaatggaaacctttaatctatatttatcacagtctgttttggtacacatgatgaattcttctaatgctgtactaaattcgatatctttttcgatttctggatatgtttttaataaagtatgaacaaagaaatggaaatcgtaataccagttatgttcaactttgaaattggtttttattttcttgttaatgattccagccacttgggaaaagtcaaagtcgtttaatgccgatttaatacgttcattaaaaacaaactttttatcctttagatgaattattattggttcattggaatcaaaaagtaagatattatcgggtttaagatctgcgtgtaaaaagttgtcacagcatggcagttcgtaaattttaatgtataacagagacatctgtaaaaagataaactttatgtattgtaccaaagatttaaatcctaatttgatagctaactcggtatctactttatctgccgaatacagcgctaagggaaaaattataatgtttcctctttcgtattcgtagttagttctcttttcatgttcgaaaaagtgaaacatgcggttaaaatagtttataacattaatattactgttaataactgccggataaaagtgggatagtaatttcacgaatttgatactgtcctttctctcgttaaacgcctttagaaaaactttagaagaatatctcaatgatagttcctggccatccatagtttgtatcaataatagcaacatattaagaacccgtttatacagagtatgtaaaaatgttaatttatagtttaatcccatggcccatgcacacacgattaattttttttcgtctccctttagattgttgtatagaaatttgggtactgtgaactccgccgtagtttccatgggactatataattttgtggcctcgaatacaaattttactacatagttatctatcttaaagactataccatatcctcctgtagatatgtgataaaaatcgtcgtttataggataaaatcgtttatccttttgttggaaaaaggatgaattaatgtaatcattctcttctatctttagtagtgtttccctattaaaattcttaaaataatttaacaatctaactgatggagcccaattttggtgtaaatctaattgggacattatattgttaaaatacaaacagtctcctaatataacagtatctgataatctatggggagacatccattgatattcaggggatgaatcattggcaacacccatttattgtacaaaaagccccaatttacaaacgaaagtccaggtttgatagagacaaactattaactattttgtctctgtttttaacacctccacagtttttaatttctttggtaatgaaattattcactatatcagtatcttctttatctaccagagattttactaacttgataacctttgctgtctcattcaatagggtagtgatatttgtatgcgtgatattgatatctttttgaattgtttcttttagaagtgattctttgatggtgtcagcatacgaattacagtaatgcagaaactcggttaacatacaggaattatagtaggcaaattccaattgttgcctgtattgtattagagtgtcaatatgagcaatggtgtcattgcgtttctctgatagaatgcgagcagcaattttggcgttatcatttgacgatatttctggaatgatgaatcctgtttctactaactttttggtaggacaaagtgaaacaatcaagaagatagcttctcctcctatttgtggaagaaattgaactcctctagatgatctactgacaatagtatctccttgacagatattggaccgaattacagaagtacctggaatgtaaagccctgaaacgccctcattttttaagcagattgttgcagtaaatcctgcaccgtgtccaagatagagcgctcctttggtgaatccatctctatgtttcagtttaaccaagaaacagtcagctggtctaaaatttccatctctatctaatacagcatccaacttgatgtcgggaactataaccggtttaatgttatatgtaacattgagcaaatccttaagttcataatcatcgctgttatcagttatgtacgagccaaacaatgtttctactgacatagtggatacgaagatgctatccatcagaatgtttccctgattagtattttctatatagctattcttctttacacgattttccaaatcagtgacgatgttcatttttttaggagtaggacgcctagtcagtatggaagatgattttctagatcctctcttcaacatttttgatctcaatggaatgcaaaaccccatagtgcaacaaccaatggtgtaacaaccgacgataaaaaataatattgtttttcactttttataattttaccatctgactcatggattcattaatatctttatacgagctactaatgtataattctttataactaaactgagatatatacactggatctatggtttccataattgagtaaatgaatgctctgcaataactaatggcaaatgtatagaacaacgaaattatactagagttgttaaagttaatattttctatgagctgttccagtaaattatttgttgtggctgcgttcaagtcataaatcatcttaatactatccagtaaacagtctttaagttctggaatattatcatcccattgtaaagcccctaattcgactatcgaatatcctgctctgatagcagtttcaatatcgacggacgtcaatactgtaataaaggtggtagtattgtcatcatcgtgataaacaacaggaatatggtcattggtaggtactgcgactttacacaacgcgatatataactttccttttgtaccatttttaacgtagttgggacgtcctgcaggatattgttttgaagaaatgatatcgagaacagatttgatacgatatttgttggattcctgattattcactataatataatctagacagatagatgattcgataaatagagaagatatatcgttggtaggataatacatccccattccagtattctcggatactctattgatgacactagttaagaacatgtcttcaattctagaaaacgaaaacatcctacacggactcattaaaacttctagagctcctgattgtgtctcgaatgcctcgtacaaggatttcaaggatgccatagattctttgaccaacgatttaatattgcgtttagcatctgatttttttattaaatcgaatggtcggctctctgatttactgccccaatgatagcaatagtcttgtaaagataagccgcaagaaaatttatactcatccatccagataactctagcaccatcggatgatattagtgtattattatagattttccatccacagttattgggccagtatactgttagcaacggtatatcgaatagattactcatgtaacctactagaatgatagttcgtgtactagtcataatatctttaatccaatctaagaaatctaaaattagatcttttacactgttaaagttaacaaaggtattacccgggtacgtggatatcatatatggtattggtccattatcagtaatggctccataaactgatacggcgatggtttttatatgtgtttgatctaatgaggacgaaattcgcgcccacaattcatctctagatatgtatttaatatcaaacggtaacacgtcaatctcgggacgcgtatatgtttctaaattcttaatccaaatataatgatgacctatatgccctattatcatactgtcgactatagtatacctagagaacttacgatacatctgtttcctgtaatcgttaaattttacaaatctataacatgctaaaccttttgacgacaaccattcattaatttctgatatggaatctgtattctcgataccgtatcgttctaaagccagtgctatatctccctgttcgtgagaacgctttcgtataatatcaatcaacggataatctgaagtttttggagaataatatgacacatgatctatttcgtccataaacaatctacgcataggaattggcggcgacgatcttaattttgtgcaatgagtcaatcctataacttctaatcttgtaatattcatcatcgacataacactatctatgttatcatcgtatattagtataccacgaccttcttcatttcgtgctaaaatggtatacagtcttaaatagttacgcaatatctcaatagtttcataattgttagctgttttcatcaaggttcgtaccctgtttaacatgatggtgttctatacgtctctattttctatttttaaattttcaacgatttactgtggctagatacccaatctctctcaaatatttttttagcctcgcttacaagctgtttatctatactattaaaactgacgaatccgtgattttggtaatgggttccatcgaaatttgccgaagtgatatgaacatattcgtcatcgactatcaacaattttgtattattctgaatagtgaaaaccttcacagatagatcattttggacacacaatgcatctagacttctagcggttgccatagaatatacgtcgttcttatcccaattaccaactagaagtctaatcttaactcctctattaatggctgcttctataatggagttgtaaatgtcaggccaatagtagctattaccgtcaacacgtgtagtgggaactatggccaaatgttcaatatctatactagtcttagctgacttgagtttatcaataactacatcggtgtctagatctctagaatatcccaataggtgttctggagaatcagtaaagaacactccacctataggattcttaatatgatacgcagtgctaactggcagacaacaagccgcagagcataaattcaaccatgaattttttgcgctattaaaggctttaaaagtatcaaatcttctacgaagatctgtggccagcggaggataatcagaatatacacctaacgttttaatcgtatgtatagatcctccagtaaatgacgcgtttcctacataacatctttcatcatctgacacccaaaaacaaccgagtagtagtcccacattattttttttatctatattaactgttataaaatttatatccgggcagtgactttgtagctctcccagatttctcttccctcgttcatctagcaaaactattattttaacccctttttcagatgcctcttttagtttatcaaaaataagcgctcccctagtcgtactcagaggattacaacaaaaagatgctatgtatatatatttcttagctagtgtgataatttcgttaaaacattcaaatgtcgtcaaatgatcggatctaaaatccatattttctggtagtgtttctaccagcctacattttgctccagcaggcaccgatgcaaatggccacatttagttaacataaaaacttatacatcctgttctaccaacgattctagaatatcatcggctatatcgctaaaattttcatcaaagtcaacatcacaacctaactcagttaatatattaagaagttccacgatttcatcttcgtccatatacatatccaatgcagatggttgactgattatcgagtttaaatcagtactaatatccaatccttcagaatacactctgtgtttcatcgtaatcctccgtatttaagctggtagatttttcaattatgtatcaatatagcaacaacagttcttgctcctccttgattctagcatcctcttcattattttcttctacgtacataagcatgtccaatacgttagacaacacaccgacaatggcggccgccacagacacgaatatgactagaccgaggaccatttaaaaaacactctctagctttcacttaaactgtatagatcattcttttatcacgtgtataataaaaaacattattctatttcgaatttaggcttccaaaaatttttcatccgtaaaccgataataatatatatagacttgttaatagtcggaataaacagattaatgcttaaactatcgtcatctccacgattagagatacaatacttacattctttttgctgtttcgaaactttatcaatacatgttaatacaaacccaggaaggagatattgaaactgaggctgctgaaaatgaaatggcgaatacaatagttcagataatgtaaaatcatgattccgtattctgatgatattagaactgctaatggatgtcgatggtatgtatctaggagtatctattttaacaaagcatcgatttgctaatatgcaattatccttttgattaattgttattttattcatattcttaaaaggtttcatatttatcaattcttctacattaaaaatttccatttttaatttatgtagccccgcaatactcctcattacgtttcattttttgtctagaatatccattttgttcatctcggtacatagattatccaattgataagtgcatttagtagttttgtacattttaagtttattgacgaatcgtcgaaaactagttatcgttaacattttattatttgataccctgatattaatacccctgctgttactattatttataactgatgtaacccatgtaacattggaattaattatcgatagtaatgcatcaacgcttccaaaattgtctattataaactcaccgataatttttttattgcatgttttcatattcattaggattatcaaatctttaatcttatcacgattgtatgcgttgatattacaagacgtcattctaaaagacggaggatctccatcaaatgccagacaatcacgtacaaagtacatagaaataggttttattctattgcgcatcatagattcatatagaacgcctgtagaaatactaatttgttttactctataaaataccaatgcatctatttcatcgttttgtataacttctttccaagtgtcaaactccaaatttttttcattgatagtaccaaaatcttctatctctttaactacttgcatagataggtaattacagtgatgtctacaagctgttttttgaaactgaatcgatgcatctagaagcgatgctacactagtcacaatcaccactttcatatttagaatatatgtatgtaaaaatatagtagaatttcattttgttttttctattctataaatgaattctcattttgcgtctgcccatactccgttttatatcaataccaaagaaggaagatatctggttctaaaggccgttaaagtatgcgatgttagaactatagaatgtgaaggaagtaaagcttcctgcgtactcaaagtagataaaccctcatcgcccgcgtgtgagagaagaccttcgtctccatccagatgcgagagaatgaataaccctggaaaacaagtaccgtttatgaggacggacatgctacaaaatatgttcgccgctaatcgcgataatgtggcggcgagacttttgaactaaaatacaattatatctttttcgatattaataaatccgtgtcgcccgggttttttatctctttcagtatgtgaatagataggtattttatctctattcatcatcgaatttaagagatctgataaacattgtttgtattctcccgatgtcagcatctggtacaataatatatgcgcacataaacctctggcacttatttcatgtaccgtccccttatcactaaggagaatagtatttgagaaatatgtatacatgatattatcatgaattagatatacagagtttgtaacactctcgaaatcacacgaggtgtcggcgttaagatctaatatatcactcgataacacattttcatctagatacactagacattttttaaagctaaaatagtctttagtagtaacagtaactatgcgagtattttcatcgatgatgcatttcatcggcatattattacgagtaccatcaaagactataccatgtgtatatctaacgtattctagcatagttgccatacgcgcattaaacttttcaggatctttggatagatcttccaatctatctatttgagaaaacatttttatcatgttcaatagttgaaacgtcggatccactatatagatattatctataaagattttaggaactacgttcatggtatcctggcgaatattaaaactatcaatgatatgattatcgttttcatcttttatcaccatatagtttctaagatatgggattttacttaatataatattatttcccgtaataaattttattagaaatgccaaatctataagaaaagtcctagaattagtctgaagaatatctatatcgccgtaccgtatatttggattaattagatatagagaatatgatccgtaacatatacaacttttattatgacgtctaagatattcttccatcaacttattaacatttttgactagggaagatacattatgacgtcccattacttttgccttgtctattactgcgacgttcatagaatttagcatatctcttgccaattcttccattgatgttacattataagaaattttagatgaaattacatttggagctttaatagtaagaactcctaatatatccgtgtatgtggtcactaatacagattgtagttctataatcgtaaataatttacctatattatatgtttgagtctgtttagaaaagtagctaagtatacgatcttttatttctgatgcagatgtatcaacatcggaaaaaaatctttttttattcttttttactaacgatacgaatatgtctttgttaaaaacagttattttctgaatatttctagtttgtaattttaacatatgatattcgttcacactgggtaatctacctaaataggtttctataatctttaatgtgatattaggaagagtattctgatcaggattcctattcattttgaggatttaaaactctgattattgtctaatatggtctcaacacaaactttttcacagagcgatagagtttttgataactcgtttttcttaagaaatataaaactactgtctccagagctcactctatcttttattttatctaattcgatacaaactcctgatactggttcagaaagtaattcattaattttcagtcctttatagaagatagttaatatagataatacaaaatcttcagttcttgatatcgatcggattgatcctagaactagatatattaataaagtactcattaggcagtttatggcagcttgataattagatatagtatattccagttcatatttattagataccacattgcccagattttgatattctatgaattcctctgaaaataaatccaaaataactagacattctattttttgtggattagtatactctcttccctctatcatgttcactactggtgtccacgatgacaaatatctagagggaatataatatagtccataggatgccaatctagcaatgtcaaataactgtaattttattcttcgctcttcattatgaattaattcttgaggtataaacctaacacaaattttattattagacttttcgtatgtaatgtctttcatgttataagtttttaatcctggaatagaatctatcttaatgaggcttttaaatgcggagttctccaacgagtcaaaacataatactctgttgtttttcttatatataatattacgattttcttctttgaatggaataggtttttgaattagtttataattacaacataatagataaggaagtgtgcaaatcgtacgcggaaaaaacataatagctcccctgttttcatccatggttttaagtaaatgatcactggcttccttagtcaatggatattcgaacattaaccgtttcatcatcattgggcaaaatccatatttcttaatgtaaagagtaatcaactcattgtgtttattgtaccatcttgttgtaaatgtgtattctgttatcggatctgctcctttttctattaatgtatcgatgtcgatctcgtctaagaattcaactatatcgacatatttcatttgtatacacataaccattactaacgtagaatgtataggaagagatgtaacgggaactgggtttgttgattcacaaactattctaatacatagttcttctgttaatacgtcttgcacgtaatctattatagatgccaagatatctatataattattttgtaagatgatgttaactatgtgatctatataagtagtgtaataattcatgtatttggatatatgttccaactcggtctttgtaatctctagtttcgtaatatctatagcatcctcaaaaaatatattcgcatatattcccaagtcttcagttctatcttctaaaaaatcttcagcatatggaatataataatctattttgcctcttctgatgtcattaatgatatagtttttgacactattttccatcaattgattcttattcactatgtctaaaaaccggatagcgtccctaggacgaactactgccattaatatctctattatagcttctggacataattcatctattataccagaattaatggtaactattccgtatctatctaacatagttttaagaaagtcagaatctaagacctgatgttcatatattggttcatacatgaaatgatctctattgatgatagcgactatttcattctctgaaaattggtaactcattctatatatgctttccttgttgataaaggataggatatactcgatggaatttgtaccaacaaactgttctcttatgaatcgtatatcatcatctgaaataatcatgtaaggcatacacttagcaattagtgacttgtctcctgttatcaatatactattcttgtgataatttatgtgtgaggcaaatttgtccacgttttttaattttgttatagtggatatcaaatccaatggagctacagttcttggcttaaacagatatagtttttctggaacgaattctacaacattattataaagaactttgggtagataagtgggatgaaatcctactttaattaatgcgatcgccttgtcctcatgtaaatatccaaacgcctttgtgatagtatggcattcattatctagaaacgctctacgaatatctgtaacagatatcatctttagagaatactagtcgcattaaaagtactaaaatttgtattttttaatctatcgcaataaaaaaattaatatttatgaattcaatgtataactagaacataatcagaatctaatgatgacgtaaccaagaagtttatctacagccaatttagctgcattatttttagcatctcgtttagtttttccatcggccttatcgaatactcttccatcgatgtctacacatgcataaaatataggagagttactaggtcccactgattcaatacgaaaagaccaatctctcttagttatttgacagtactcattaataatggtgacagggttagcatttttccaatcaataatttttttagccggaataacatcatcaaaagacttatgatcctctctcattgatttttcgcgggatacatcatctattatggcatccgccatagtattagtatccggcttatccgcctccgttgttataaaccaacgaggaggaatatcgtcggatctgtacaccatagcactgcgttgaagatcgtacaaagctttattaacttctcgcttctccatattaagttgtctagttagttgtacagcagtagctccttcgagtccaatgtttttaatagcctcgcatacaatcgctgcgtcagaacactcgtcaatatagatcttagacatttttagagagaactaacaccaccagcaataaaactgaacctactttatcattttttttattcatcatcctctggcggttcgtcgttcctatcgaacgtggctctgattaacccgtcatctataggtgatgccggttctggagattctggaggagatggattattatctggaagaatctctgttatttccttgttttcatgtatcgattgtgttgtaacattaagattgcgaaatgctctaaatttgggaggcttaaagtgttgtttacaatctctacacgcgtgtctaactaacggaggttcatcagctgctctagtttgaatcatcatcggtgtagtattcctacttttacagttgggacacggtgtattgtatttctcgtcgagaacgttaaaataatcgttgtaactcacatcctttattttatctatattgtattctactcctttcttaatgcattttataccgaataagagatatcgaaggaattctttttcggtgccgctagtacccttaatcatatcacatagtgttttatattccaaatttgtggcaatagacggtttatttctatacgatagtttgtttctggaatcctttgagtattctataccaatattattctttgattcgaatttagtttcttcgatattagattttgtattacctatattcttgatgtagtactttgatgatttttccatggcccattctattaagtcttccaagttggcatcatccacatattgtgataataattctcggatatcagtagcggctaccgccattgatgtttgttcattggatgagtaactactaatgtatacattttccatttataacacttatgtattaactttgttcatttatattttttcattattatgttgatattaacaaaagtgaatatatatatatgttaataattgtattgtggttatacggctacaatttcataatgagtggaagtcagtgtcggatgatcaacgacgatagctttactttgaaaagaaagtatcaaatcaatagtgtggagtcaacaatgaaaatggataagaagaggacaaagtttcagaatagagccaagatggtaaaagaaataaaccagacaataagagcagcccaaactcattacgagacattgaaactaggatacataaaatttaagagaatgattaggactactactctagaagatatagcaacatctattccaaatattcagaaaatttataaactattctcagacatttcagccattggaaaagcatcacagaatccgagtaagatggtatatgctctactgctttatatgtttcccaatttgtttggagacgatcatagattcattctttatagaatgcatccaatgagcaaaatcaaacacaagatcttctcaccgttcaaacttaatcttattaggatattagtggaagaaagattctataataatgaatgcaaagattatagatggaaaataattggatcacaagttgataaaatattgatagctgaatctgctaaatatacaatgaatgcaatgtatcgcctaagaccgatacatagaatcaaggtagaatctgaagaagataccctcttcatcaaacagatggtagaaaaatgtgtaacatcccaggaattggtggaaaaaatgttgaagatactgtttagagatttgttcaagagtggagaatacaaagcgtacaggtacgatgatgatgtagaaaatggattcattggattggataaactaaaattaaacattgttcatgatatagttgaaccatgtatgcctgtccgcaggccagtggctaagatactgtgtaaagaaatggtaaataaatactttgagaatccgctacatattattggtaagaatcttcaagagtgcattgactttgttagtgagtagacattcatctttctcctttctccaatactaattcaaattgttaaattaataatggatagtataaaatagttattagtagtaagataagataagataagataagataagataagataagataagataagataagatagtaaaaataattattagaataagagtgtagtatcatagataagtatttactctcttctataaaaatggattttattcgtagaaagtatcttatatacacagtagaaaataatatagattttttaaaggatgatacattaagtaaagtaaacaattttaccctcaatcatgtattagctctcaagtatctagttagcaattttccccaacacgttattactaaggatgtattagataataccaatttttttgtttttatacatatggtacgatgttgtaaagtatacgaggcggttttacgacacgcatttgatgcacccacattgtatgttaaagcattgactaagaattatttatcgtttagtaacgcaatacaatcatacaaggaaaccgtgcataaactaacacaggatgaaaaatttttagaggtagctgaatacatggaagaattaggagaacttataggcgtaaattatgacttagttcttaatccattatttcacggaggggaacccatcaaagatatggaaatcatttttttaaaactgtttaagaaaacagacttcagcattgttaaaaaattaagtgttataagattacttatttgggcatacctaagcaagaaagatacgggcatacagtttgcggataatgatagacaagatatatatactctatttcaacaaactggtagaatagtccatagcaatctaacagaaacgtttagagattatatctttcccggagataagactagctattgggtgtggttaaacgaaagtatagctaatgatgcggatatcgttcttaatagacccgccattaccatgtatgataaaattcttagttatatatactctgagataaaacagggacgcgttaataaaaacatgcttaagttagtttatatctttgagcctgaaaaagatatcagagaacttctgctggaaatcatatatgatattcctggagatatcctatctattattgatgcaaaaaatgacgattggaaaaaatattttattagtttttataaagctaattttatcaacggcaatacatttattagtgatagaacatttaacgaggacttattcagagttgttgttcaaatagatcccgaatatttcgataatgaacgaattatgtctttattctctacgagtgctgcggacattaaacgatttgatgagttagatattaataaaagttatatatccaatataatttatgaggtgaacgatatcacattagatacaatggatgatatgaagaagtgtcaaatctttaacgaggatacgtcgtattatgttaaggaatacaatacatacctgtttttgcacgagtcggatcccatggtcatagataacggaatactaaagaaactgtcatctataaaaaccaagagtaaacgactgaacttgtttagcaaaaacattttaaaatattatttagatggacaattggctcgtctaggtcttgtgttagatgattataaaggagacttgttagttaaaatgataaaccatctcaagtctgtggaggatgtatccgcattcgttcgattttctacagataaaaaccctagtattcttccatcgctaatcaaaactattttagcgagttataatatttccatcattgtcttatttcaaaggtttttaagagataatctatatcatgtagaggaattcttggataaaagcatccatctaaccaagatggataagaaatatatacttcaattgataaggcacggtagatcatagaacaaaccaaacatattattaataatttgtatatacatagatataattatcacatattaaaaattcacacattttggtaaatgggaactgctgcaaccattcagactcccaccaaattaatgaataaagaaaatgcagaaatgattttggaaaaaattgttgatcatatagttatgtatattagtaacgaatcaagagatgtaaataatcctgaatatattgattttcgtaacagatacggagactatagatctctcattataaaaagtgatcacgagtttgtaaaactatgtaaaaatcatgcgaagaaaagttctccagaaacacaacaaatgattatcaaacacatctacgcacaatatcttattccggtatctgaagtactattaaaacctatgatgaccatgggtgacataattacatataacggctgtaaagacaatgaatggatgctacaacaactctctaccctaaactttaacaatctccacacgtggaactcgtgtagcataggcaatgtaacgcgtctgttttatacattttttagttatctgatgaaagataaactagatatataagtataatcccattctaatactttaacctgatgtattacctgcatcttattagaatattaacataactaaaagacataacataaaaacttattacatagttgataaaaagcggtaggctataaatattatggctacagttgttccgcgtgttgacgatgtgtacaaaaatgcacaaagaagaattctagatcaagaaacattttttagtagaggtctaagtagaccgttaatgaagaacacatatctatttgataattacgcgtatggatggataccagaaactgcaatttggagtagtagatacgcaaacctagatgctagtgactattatcccatttcgttgggattacttaaaaagtttgagtttctcatgtctctatataaaggtcctattcccgtatatgaagaaaaagtaaatactgaattcattgctaatggatctttctccggtagatacgtatcatatcttagaaagttttctgcccttccaacaaacgagtttattagttttttattattgacctccatccctatctataatatcttattctggtttaaaaacacacagtttgatattactaaacacacattattcagatacgtctatacagataatgccaaacacctggcgttggctaggtatatgcatcaaacaggtgactataagcctttgttcagtcgtctcacggagaattatatatttaccggtcctgttccgataggaatcagagatatagatcaccctaatcttagtagagcaagaagtccatccgattatgagacattagctaatattagtactatattgtactttaccaagtatgatccggtattaatgtttttattgttttacgtacctggatattcgattactacaaaaattactccagcagtagaatatctaatggataaactgaatctaacaaagagcgatgtacaactgttgtaaattattttatgcttcgtaaaatgtaggtcttgaaccaaacattctttcaaagaatgagatgcataaaactttattatccaatagattgactatttcggacgtcaatcgtttaaagtaaacttcgtaaaatattctttgatcgctgccgagtttaaaacttctatcgataattgtttcatatgttttaatatttacaagttttttggtccatggttcattagctggacaaatatatgcaaaataatatcgttctccaagttctatagtctctggattatttttattatattcagtaaccaaatacatattagggttatctgcggatttataatttgagtgatgcattcgactcaacataaacaattctagaggagacgatctactatcaaattcggatcgtaaatctgtttctaaagaacggagaatatctatacatacctgattagaattcatccgcccttcagataacatttcagacagtctggtcttgtatatcttaatcatgttcttatgaaacttggaaacatctcttctagtttcactagtacctttattaattctctcaggtacagattttgaattagacgatgccgagtatttcatagttgtatatttctttttcgattgcataatcagattcttatataccgcctcaaactctattttaaaattattaaacaatactctactattaatcaatcgttctaactcctttgctatttctatggacttatctacatcttgactgtctatctctgtaaacacggagtcggtatctccgtacacgctacgaaaacgaaatctgtaatctatagacaacgatgttttcacaatcggattaatatctctatcgtccatataaaatggattacttaatgggttggcaaatcgtaacataccatcagataactctgctccatttagtaccgattctagatacaagatcattctacgtcctatggatgtgcaactcttagccgaagcgtatgagtatagagcactgtttctaaatcccatcagaccatatactgagttggctactatcttgtacgtatattgcatggaatcatagatggccttttcagttgaactggtagcctgttttagcatctttttatatctggctctctctgccaaaaatgttctcaatagtctaggaatggttccttctatcgatctatcgaaaattgctatttcagagatgaggttcggcagtctaggttcacaatgaaccgtaatatatctaggaggtggatatttctgaagtaagagctgattatttatttcttcttccaatctattggtactaacaacgacaccgactaatgtttccggagatagatttccaaagatacacacattaggatacaggctgttataatcaaagattaatacattattactaaacattttttgttttggagcaaataccttaccgccttcgtaaggaaacttttgttttgtttctgatctaactaagatagttttagtttccaacaatagctttaacagaggacccttgatgactgtactcgctctatattcgaataccatggattgaggaagcacgtatgttgatgcacccgcgtctgtttttgtttctactccgtaatactcccacaaatactgacacaagcaagcatcgtgaatacagtatctagccatatctaaagctatgtttagattataatccttatacatctgagctaaatcaacgtcatcctttccgaaagataatttatacttatcatttgttaaagtgggacacgatagcacgactttgaatccattttcccaaatatctttatgaattactttacatataatatcctcattaaccgtcacataattacctgtagttaaaacctttgcaaatgcagcggctttgcctttcgcgtccgtagtatcgtcaccgatgaacgtcatttctctaactcctctattcaacactttggtcatacaaccaaaagcgttcttggctatagaatccaatttgtacgaatccaatttttcagatttttgaatgaatgaatatagatcgaaaaatatagttccattattgttattaacgtgaaacgtagtattggccatgccacctactcccttatgactagactgatttctctcataaatacagagatatacagcttcctttttgtctggagatctaaagataatcttctctccggttaataactctagacgattagtaatatatctcagatcgaagttatgtccgttaaaagtaacgatatagtcgaacgttagttccaacaattgtttagctatttgtaacaaaactatttcagaacatagaactagttctcgttcgtaatccatttccatcagtgactgtatcctcaaacatcctctatcgacggcttcttgcatttcctgttccgttaacatctcttcattaatgagcgtaaacaataatcgtttgccacttaaatcgatatagcagtaacttgtatgtgagattggattaataaatacagaaggaaacttcttatcgaagtgacactctatatctagaaataagtacgatcttgggatatcaaatctaggtatttctttagcaaaacagttacgtggatcgtcacaatgataacatccattgttaatctttgtcaaatattgctcgtccaacgagtaacatccgtctggagatatcccgttagaaatataaaaccaactaatattgagaaattcatccatggtggcattttgtatgctgcgtttctttggctcttctatcaaccacatatctgcgacggagcattttctatctttgatatctagattataacttatcgtctcgtcaatgtctatagttctcatctttcccatcggtctcgcattaaatggaggaggagccaatgcctgatatatttcgtcactcactacgtaataaaagtaatgaggaaatcgtataaatacggtctcaccatttcgacatctggatttcagatataaaaatctgttttcgccacgactttcgaaccaattaatgcaccgaacatccatttctagaatttagaaatatattttcatttaaatgaatcccaaacattggggaagagccgtatggactattatttttatagtactttctcaagcgggtttagatggcaacatagaagcgtgtaaaagaaaactatatactatagtcagcactcttccatgtcctgcatgtagacgacacgcaactatcgctatagaggacaataatgtcatgtctagcgatgatctgaattatatttattattttttcatcagattatttaacaatttggcatctgatcccaaatacgcgatcgatgtgacaaaggttaaccctttataaacttaacccattataaaacttatgattagttacgactgaaataacagcgtaattattttttggtataattctacacggcatagtttctgtaactatgaattcaacacccattatcttagtgaaatctttaacaaacagtaagggttcgtcaaagacataaaactcattgtttacgatcgaaatagatcccctatcacacttaaaataaaaaatatccttatcctttatcaccaaataaaattctgattggtcaatgtgaatgtattcacttaacagttccacaaatttatttattaaccccgaggcacatacatcgtcggtattttttatggcaaactttacgcgtccagcatccgtttctaaaaaaatattaacgagttccatttatatcatccaatattattgaaatgacgttgatggacagatgatacaaataagaaggtacggtacctttgtccaccatctcctccaattcatgctctattttgtcattaactttaatgtgtgaaaacactactccacatgcttccatgacagtgtgtaacactttggatacaaaatgtttgacattagtataattgtccaatactgtcaatctataatagatagtagctataatatattctatgatggtattgaagaagatgacaaccttggcatattgatcatttaacacagacatggtatcaacagatagcttaaatgaaagagaatcagtaattggaataagcgtcttctcgatggagtgtccgtataccaacatgtctgatattttgatgtattccattaaattatttagttttttctttttattctcgttaaacagcatttctgtcaatagaccccaacatcgttgaccgattaagttttggttgatttttccatgtaaggcgtatctagtcagatcgtatagcctatccaataatccatcgtctttgtgtagatcacatcgtacactttttaattctctatagaagagcgacagacatctggaacaattacagacagtaatttctttattctctacagatgtaagatacttgaagacatccctatgatgatgtagaattttggataacacggtattgatggtatctgttaccataatacctttgatggctgatagtgtcactgcacaagatttccaatctttgacaattttcagcaccattatctttgttttgatgtctatatcagacagcatggtgcgtctaacaacacagggattaagacggaaagatgaaatgattctctcaacatcttcaatagatatcttactattttttctggcattatctatatgtgtgagaatatcctctagagaatcggtatcctttttgatgatggtggatctcaacgaaatgggacgtctaaaccttcttattctatcaccagattgcatggtgatttgtcttctttcttttatcatgatgtaatctctaaattcatcggcaaattgtctatatctaaaatcataatatgagatgtttacctctacaaatatctgttcgtccaatgttagagtatctacatcagttttgtattctaaattaaacatggcaacggatttaattttatattcctctattaagtcctcgtcgataataacagagtgtagataatcatttaatccgtcgtacatggttggaagattttcgttaacaaaatctttaattgtcttgatgaatgtgggactatatctaacatcttgattaataaaatttataacattttccataggatactttgtaactagttttatacacatctcttcatcggtaagtgtagacagaatatcgtgaacaggtggtatattatattcatcagatatacgaagaacaatgttcaaatctagattgtttaatatattatatagatgtagtgtagctcctatagggatatctttaactaagtcaattatttcatcaaccgttagatctattttaaagttaatcatataggcattgatttttaaaaggtatgtagccttgactacattctcattaattaaccattccaagtcactgtgtgtaagaagattatattctatcataagcttgactacatttggtcccgataccattaaagaattcttatgatataaggaaacagcttttaggtactcatctactctacaagaattttggagagccttaatgatatcggtgacgtttattatttcaggaggaaagaacctaacattgagaatatcagaattaatagcttccagatacagtgattttggcaatagtccatgtaatccataatccagtaacacgagctggtgcttgctagacaccttttcaatgtttaatttttttgaaataagctttgataaagccttcctcgcaaattccggatacatgaacatgtcgccgatatgaatgagtttttttcagtattttatatttttctcaacaagttctcaatacaccaatagatgatagaatatcacccaatgcgtccatgttgtctatttccaacaggtcgctatatccaccaatagaagttttcccaaaaaagattctaggaacagttttaccaccagtaatttgttcaaaatagtcgcgcaattcattttcgggtttaaattctttaatatcgacaatttcatacgctcctcttttgaaactaaacttatttagaatatccagtgcgtttctacaaaaaggacatgtatacttgacaaaaattgtcactttgttattggccaacctttgttgtacaaattcctcggccattttaatatttaagtgatataaaactatctcgacttatttaactctttagtcgagatatatggacgcagatagctatatgatagccaactacagaatgcgaacgctataaaaaacataattacaacgagcatttataaatatttttattcagcattacttgatatagtaatattaggcacagtcaaatattcaaccactctcgatacattaactctctcattttctttaacaaattctgtaatatcttcgtaaaaagattcttgaaactttttagaatatctatcgactctagatgaaatagcgtttgtcaacatgctatgttttgtgtacataaatgcgcccattttaacagtttctagtgacaaaatactagcgatcctaggatcctttagaatcacatagattgacgactcgtctctcttagtaaccctagtaaaataatcatacaatctagtacgtgaaataatattatccttgacctgaggagatctaaacaacctagttttgaggacatcgataagttcatcgggaatgacatacatactatctttaatagaactcttttcatccagttgaatggattcgtccttaaccaactgattaatgagatcttctattttatcattttccagatgatatgtatgtccattaaaggtaaattgtgtagcgcttctttttagtctagcagccaatactttaacatcactaatatcgatatacaaaggagatgatttatcgatggtattaagaattcgtttttcgacatccgtcaaaaccaattcctttttgcctgtatcatccagttttccatcctttgtaaagaaattattttctactagactattaataagactaataaggattcctccgtaattgcacaatccaaactttttaacaaaactagactttacaagatctacaggaattcgtacttcaggtttcttagcttgtgattttttcttttgcgggcattttctagtgaccaactcatctaccatttcattgattttagcagtgaaataagctttcaatgcacgggcactgatactattgaaaatgagttgatcatcaaattccgccatttaagttcaccaaacaacttttaaatacaaatatatcaatagtagtagaataagaactataaaaaaaataataattaaccaataccaaccccaacaaccggtattattagttgatgtgacagttttctcgtcacttagaacagatttaacaatttctataaagtctgtcaaatcatcttccggagaacccataaatacaccaaatatagcagcgtacaacttatccatttatacattgaatattggcttttctttatcgctatcttcatcatattcatcttcaatatcaacaagtcccaggttacgagccagatcttcttctacattttcagtcattgatacacgttcactatctccagagagtccgataacgttagccaccacttctctatcaatgattagtttcttgagagcgaaagtaatttttgtttctgttccggatctatagaagacgataggtgtgataattgccttggccagttgtctttctcgtttacccagtgcttctagttcgccttctatagatctgagaatagatgattctccagccgaaacatattctaccatggctccgtttaatttgttgatgaagatggattcatccttaaatgttttctctgtaatagtttccaccgaaagactatgcaaagaatttggaatgcgttccttgtgcttaatgtttccatagacagcttctagaagttgatacaacataggactagccgcggtaacttttatttttagaaagtatccatcgcttctatcttgtttagatttatttttataaagtttagtctctccttccaacataataaaagtggaagtcatttggctagataaactatcagtaagttttatagagatagacgaacaattagcatattgagaagcatttagtgtaacgtattcgatacattttgtattagatttactaatcgattttgcatactctataacaccagcacaagtctgtagagaatcgctagatgctgtaggtattggtgaagtttcaactctcttcttgattaccttactcatgattaaacctaaataattgtactttgtaatataatgatatatattttcactttatctcatttgagaataaaaatgtttttgtttaaccgctgcatgatgtacagatttcggaatcgcataccatggacggttttattttttccttgtccaatgtaaactgaatgggagaggatgcggctttcgtacgtagatagtacatgcctgtttttagaccgagactccatccgtaaaaatgcatactcgttagtttggaatagctaggatcggctatgtgaatattcatcgactgactttgatcgatgaaggctcccctgtctgcagccatttttatgatcgtcttttgtggaatttcccaaatagttttataaactcgcttaatatcttctggaaggtttgtattctgaatggatccaccatctgcaataatcctatttttgatctcttcattccataattttctctcggttaaaactctaaggagatgaggattaactacttgaaattctccagacaatactctacgagtgtaaatattactggtatacggttccactgactcattatttcccaaaatttgagcagttgatgcagtcggcataggtgccaccaatagactatttctaagaccatgtgatcggattttatcttttagagattcccaattccaaagatccgatggtacaacattccaaagatcgtattgtagaatgccgttactagcgtatgatcctgcatatgtatcgtatggtccttctttttcggctagttcacaactcgcctctaatgctccataataaatggtttcgaaaatcttcttattgagatcttgtgcttccgggctatcaaatggataatttaagagaataaacgcgtctgctaatccttgaacgccaataccgataggtctgtgtctcttattagaaatttcagcttctggaataggataataattaatatctataattttattgagatttctgactattactttgaccacatcctttagtttgagaaaatcaaatctcccatctattacaaacacgttcaaggcaacagatgccagattacaaacggctacctcattagcatcggcatattgtataatttcagtgcaaagattactacacttgatggttcctaaattttgttgattactctttttgttacacgcatccttataaagaataaacggagtaccagtttcaatctgagattctataatcgctttccagacgactcgagcctttattatattcttgtatctcttttctctttcgtattgtgtatataatcgttcgaactcgtctccccaagcattgtctaatccaggacattcattcggacacatcaatgaccactctccatcatcatttactcgtttcataaagagatcaggaatccaaagagctataaatagatctctggttctatgctcctcgtttcctgtattctttttaagatcgaggaacgccataatatcagaatgccacggttccaagtatatggccataactcccggccgtttgtttcctccctgatctatgtatctagcggtgttattataaactctcaacattggaataataccattggatgcaccattggtcccggagatatagcttccactggcacgaatattgctaattgatagacctattccccctgccattttagagattaatgcgcatcgttttaacgtatcatagatgccctctatactatcatccatcatgttaagtagaaaacagctagacatttggtgacgactagttcccgcattaaataaggtaggagaagcgtgcgtaaaccatttttcagacagtagattgtacgtctcaatagctgattctatatcccattgatgtattcctaccgcgacacgcattaacatatgctgaggtctttcaacgatcttgttatttattttcaacaagtaggatttttccaaagttttaaaaccaaaatagttgtatgaaaagtctcgttcgtaaataataaccgaattgagtttatccttatatttgttaactatatccatggtgatacttgaaataatcggagaatgtttcccatttttaggattaacatagttgaataaatcctccatcacttcactaaatagtttttttgtttccttgtgtagatttgatacggctattctggcggctagaatggcataatctggatgttgtgtagtacaagtggctgctatttctgctgccagagtgtccaattctaccgttgttactccattatatattccttggataaccttcatagctattttaataggatctatatgatcagtgtttaagccataacataattttctaatacgagacgtgattttatcaaacataacattttcccggcatccatttcgtttaacgacaaacatttttgtcggtgtagtaaaaaatttatttaacttttcattaatagggacttgacgtacgtagcgtacaaaatgatcgttcctggtatatagataaagagtcctatatatttgaaaatcgttacggctcgattaaactttaatgattgcattgtgaatatatcattaggatttaactccttgactatcatggcggtgccagaaatcaccatcaaaagcattaatacagttatgccgatcgcagttagaacggttatagcatccgccatttatatctaaaaattagatcaaagaatatgtgacaaagtcctagttgtatactgagaattgacgaaacaatgtttcttacatattttttttttattagtaaccgacttaatagtaggaactggaaaactagacttgattattctataagtatagatgcccttccagataatattctctttgataaaagttccagaaaatgtagaattttttaaaaagttatcttttgctattaccaatattgtggttagacgcttattattaatatgagtgatgaaatccacaccgcctctagatatcgcttttatttccacattagatggtaaatccaatagtgaaactatttttttaggaatatatggactcgcatttagaggagtgaacgtcttaggcgtcggaaagaatgattcgtcaaacgaataaacaatttcacaaatggatgttaatgtattagtaggaaatttcttgacgctagtggaattgaaaattctaatggatgatgttctacctatttcatccgataacatgttaatttccgacactaacggttttaatatttcgatgatatacggtagtctctctttcggacttatatagcttattccacaatacgagtcattgtatactccaaaaaataaaataacgagtataaagtctgtatcgaatgggaaaaatgaaattatcgacataggtatagaatccggaacattgaacgtattaatacttaattctttctcagtggtaagaaccgataggttattgacattgtatggttttaaatattctataacttgagacttgatagatattaatgacgaattgaaaattatttttatcaccacgtgtgtttcgggatcatagtcgacgcccgtcaaccaaccgaatggagtaaaataaatatcattaatatatgctctagatattagtatttttattaatcctttgattatcatcttctcgtacgcgaatgattccatgatcaagagtgatttgagaacatcctccggagtattaatgggcttagtaaatagtccatcgttgcaataataaaagttgtccaagttaaaggatattatgcattcgtttaaagatatcgcctcatctgacggagacaattttttggtaggttttagagactttgaagctacttgtttaacaaagttattcatcgtcgtctactattctatttaattttgtagttaatttatcacatatcacattaattgactttttggtccatttttccatacgtttatattcttttaatcctgcgttatccgtttccgttacatccagtgatagatcttgcaagttaaatagaatgctcttaaataatgtcattttcttatccgctaaaaatttaaagaatgtataaacttttttcaaagatttgaaacttttaggaggagttctaatgcacaatatcataaacaaactaataaacatcccacattcagattccaacaattgattaacttccacattaatacagcctattttcgctccaaatgtatattcgaaaaatctgaataaaacatcaatgtcgcaatttgtattgtccaatacagaatgtcggtgattcgtgttaaaaccatcggagaaggaatagaaataaaaattattatagtggtggaattcagttggaatattgcctccggagtcataaaaggatactaaatattgttttttatcataaattacacatttccaatgagacaaataacaaaatccaaacattacaaatctagaggtagaacttttaattttgtctttaagtatatacgataagatatgtttattcataaacgcgtcaaatttttcatgaatcgctaaggagtttaagaatctcatgtcaaattgtcctatataatccacttcggatccataagcaaactgagagactaagttcttaatacttcgattgctcatccaggctcctctctcaggctctattttcatcttgacgacctttggattttcaccagtatgtattcctttacgtgataaatcatcgattttcaaatccatttgtgagaagtctatcgccttagataccttttctcgtagtcgaggtttgaagaaatacgccaacggtacactagtaggtaactcaaatacatcgtatatagaatggtagcgcgtctttaactcgtcggttagctctttcttttgatcgagttcgtcgccactattgggtctactcaagtgcccagactctactagttccagcatcataccgataggtatacaagacactttgccagcggttgttgatttatcatatttctccactacatatccgttacaatttgttaagaatttcgatacatctatattgctacataatccagctagtgaatatatatgacataataaattggtaaatcctagttctggtattttactaattactaaatctgtatatctatccatttatcatggaaaagaatttaccagatatcttcttttttccaaactgcgttaatgtattctcttacaaatattcacaagatgaattcagtaatatgagtaaaacggaacgtgaaagtttctcattggcagtgtttccagtgataaaacatagatggcataacgcacacgttgtaaaacataaaggaatatacaaagttagttcagaagcgcgtggagaaaaagtatctcccccatcactaggaaaacctgtttatataaacctaactacgaggcaatatatatacagtgagtatacaataagctttgaatgttatagttttctaaaatgtataacaaatacagaaatcaattcgttcgatgagtatatattaagaggactattagaagctggtaatcagttacagatattttccaattccgtgggtaaacgaacagatactataggtgtactagggaataagtatccatttagcaaaattccattggcctcattaacccctaaagcacaacgagagatattttcagcgtggatttctcatagacctgtagttttaactggaggaaccggagtgggtaagacgtcacaggtacccaagttattgctttggtttaattatttatttgggggattctctactctagataaaatcactgactttcacgaacgaccagtcattctatctcttcctaggatagctttagttagattgcatagcaatactattttaaaatcattgggatttaaggcactaaatggatctccgatttctttacgatatggatctataccggacgaattaataaacaaacatccaaaaaaatatggaattgtattttctacccataagttatctttaacaaaactatttagttatggcactcttattatagacgaagttcatgagcatgatcaaataggagatatcattatagcagtagcgagaaagcatcatacgaaaatagattctatgtttttaatgactgccacgttagaggatgacagggaacgtctaaaagtatttttacccaatcccgcatttatacatattcctggagaaacactctttaaaattagtgaggtgtttattcataataagataaatccatcttccagaatggcatacatagaagaagaaaagagaaatttagtcactgctatacagatgtatactcctcctgatggatcatccggtatagtctttgtggcaacagtctcgcagtgtcacgaatataaatcatatttagaaaagagattgtcgtatgatatgtatattattcatggtaaggtcttagatatagacgaaatattagaaaaagtgtattcatcacctaacgtatcgatacttatttctactccttatttggaatctagcgttactatacgcaatgttacacacatttatgatatgggtagagtttttgtcccagctccttttggaggatcgcaacaatttatttctaaatctatgagagatcaacgaaaaggaagagtaggaagagttaatcctggaacgtacgtctatttctatgatctgtcgtatatgaagtctatacagcgaatagattcagaatttctacataattatatattgtacgctaataaatttaatctaacacttcccgaagatttgtttataatccctacaaatttggatattctgtggcgtacaaaggaatatatagactcgttcgatattagtacagaaacatggaataaattattatccaattattatatgaagatgatagagtatgctaaactttatgtactaagtcctattctcgctgaggagttggataactttgagaggacaggagaattaactagtactgtacgagaagccatttcatctctaaatttacgaatcaagattttaaattttaaacgtaaagatgaggatacgtatatacacttttgtagaatattattcggcgtctataatggaacaaacgctactatatattatcatagacctctaacaggatatatgaatatgatttcagatactatatttgttcctgtagataataactaaaatcaaactctaatgaccacatctttttttagagatgaaaaattttccacatctccttttgtagacacgactaaacattttgcagaaaaaagtttattagtgtttagataatcgtatacttcatcagtgtagatagtaaatgtgaacagataaaaggtattcttgctcaatagattggtaaattccatagaatatattaatcctttcttcttgagatcccacatcatctcaaccagagatgttttatccaatgatttacctcgtactataccacatacaaaactagattttgcagttacgtcgtaccttgtattcctaccaaacaaaattttacttttagttcttttagaaaattctaaggtagaatctctatttgtcaatatatcatctatggaattgccactagcaaaaaatgatagaaatatatattgatacatcgcagctggttttgatctactatactttaaaaacgaatcagattccataattgcctgtatatcatccgctgaaaaactatgttttacacgtattccttcggcatttctttttaatgatatatcttgtttagacaatgataaagttataatgtccatgagagacgcgtctccgtatcgtataaatatttcattagatgttagacgcttcattaggggtatacttctataaggtttcttaattagtccatcatttgttgcgtcaagaactactatcggatgttgttgggtatctctagtgttacacatggccttactaaagtttgggtaaataactatgatatctctattaattatagatgtatatatttcattcgtcaaggatattagtatcgacttgctatcgtcattaatacgtgtaatgtaatcatataaatcatgcgataaccaaggaaaattcaaatagatgttcatcatataatcatcgctataattcatattaatactttgacattgactaatttgtaatatagcctcgccacgaagaaagctctcgtattcagtttcatcgataaaggataccgttaaatataactggttaccaatagtctcatagtctattaagtggtaagattcgtacaaatacagaatccctaaaatattatctaatgtgggattaatccttaccataactgtataaaatggagacggagtcataactattttaccgtttgtacttactggaatagatgaaggaataatctccggacatgctggtaaagacccaaatgtctgtttgaagaaatccaatgttccaggtcctaatctcttgacaaaaattacaatattagatccggatatcctttgcatcctatttaccaacatatcacgaactatattaagattatctatcatgtctattctcccaccgttatataaatcgcctccgctaagaaacgttagtatatccatacaatggaatacttcatttctaaaatagtattcgttttctaattctttaatgtgaaatcgtatactagaaagggaaaaattatctttgagttttccgttagaaaagaaccacgaaactaatgttctgattgcgtctgattccgtcgctgaattaatagatttacaccaaaaactcatataacttctagatgtagaagcattcgctaaaaaattagtagaatcaaaggatataagtagatgttccaacaagtgagcaattcccaatatttcatctatatcattctcgaatccgaaattagaaattcccaagtagatatcctttttcatccgatcattgatgaaaatacgaactttattcggtaagacgatcatttactaaggagtaaaataggaagtaatgttcgtatatcgttatcatcgtataaattaaaggtgtggtttttgccattaagagacattataattttaccaatattggaattataatataggtgtatttgagcactcgcgacggttgatgcatcggtaaatatagctgtatctaatgttctagtcggtatttcttcatttcgctgtctaatgatagcgttttctctatctgtttctagtacagctgcctgaagtttattggtcggataatatgtaaaataataagaaatacatacgaataacaaaaataaaataagatataataaagatgccatttagagatctaattttgttcaacttgtccaaattcctacttacagaagatgaggaatcgttggagatagtgtcttccttatgtagaggatttgaaatatcttatgatgacttaataacttactttccagataggaaataccataaatatatttctaaggtatttgaacatgtagatttatcggaggaattaagtatggaattccatgatacaactctgcgagatttagtctatcttagattgtacaagtattccaagtgtatacgaccgtgttataaattaggagataatctaaaaggcatagttgttataaaggacaggaatatatatattagagaagcaaatgatgacttgatagaatatctcctcaaggaatacactcctcagatttatacatattctaatgagcacgttcacatagctgattcaaaattaattctttgcggattttctcaagttacatttatggcgtatacaacgtcgcatataacaacaaataaaaaggtagatgttctcgtttccaaaaaatgtatagatgaactagtcgatccaataaattatcaaatacttcaaaatttatttgataaaggaagcggaacaataaacaaaatactcaggaagatattttattcggtaacaggtggccaaactccataggtcgctttttctatttcagattttagaatttccaaattcaccagcgatttatcagttttggtgaaatccaaggatttattaatgtccacaaatgccatttgttttgtctgtggattgtatttgaaaatggaaacgatgtagttagatagatgtgctgcaaagtttcctattagggttccgcgctttacgtcacccagcatacttgaatcaccatcctttaaaaaaaatgataagatatcaacatggagtatatcatactcggattttaattcttctactgcctcactgacattttcacaaatactacaatacggtttaccgaaaataatcagtacgttcttcatttatgggtatcaaaaacttaaaatcgctactgctggaaaacaaatcactgacgatattggatgataatttatacaacgtatacaatggaatatttgtggatacgatgagtatttatatagccgtcgccaattgtgtaagaaacttagaagagttaactacggtattcataaaatacgtaaacggatgggtaaaaaagggagggcatgtaaccctttttatcgatagaggaagtataaaaattaaacaagacgttagagacaagagacgtaaatattctaaattaacaaaggacagaaaaatgctagaattagaaaagtgtacatccgaaatacaaaatgttaccggatttatggaagaagaaataaaggcagaaatgcaattaaaaatcgataaactcgcatttcaaatatatttatctgattctgataacataaaaatatcattgaatgcgatactaacacatttcaacaataatgagaatgttacattattttattgtgatgaacgagacgcagaattcgttatgtgtatagaggctaaaacacatttctctaccacaggagaatggccgttgataataagtaccgatcaggatactatgctatttgcatctgctgataatcatcctaagatgataaaaaacttaactcaactgtttaaatttgttccctcggcagaggataactatttagcaaaattaacggcgttagtgaatggatgtgatttctttcctggactctatggggcatctataacacccaccaacttaaacaaaatacaattgtttagtgattttacaatcgataatatagtcactagtttggcaattaaaaattattatagaaagactgactctaccgtagacgtgcgtaatattgttacgtttataaatgattacgctaatttagacgatgtatactcgtatatttctccttgccaatgcactgttcaagaatttatattttccgcattagatgaaaaatggaacgattttaaatcatcttatttagagagcgtgccgttaccctgccaattaatgtacgcattagaaccacgtaaggagattgatgtttcagaagttaaaactttatcatcttatatagatttcgaaaatactaaatcagatatcgatgttataaaatctatatcctcgattttcggatattctaacgaaaactgtaacacgatagtgttcggcatctataaggataatttactactgagtataaataattcattttactttaacgatagtctgttaataaccaatactaaaagtgataatataataaatataggttactagattaaaaatggtgttccaattagtgtgttctacgtgcggcaaagatatttctcacgaacgatataaattgattatacgaaaaaaatcattaaaggatgtgctcgtcagtgtaaagaacgaatgttgcaggttaaaattatctacacaaatagaacctcaacgtaacttaacagtgcaacctctattggatataaactaatatggatccggttgattttatcaagacatatgcacctagaggttctattatttttattaattatgccatgtcattaactagtcatttgaatccatcgatagaaaaacatgtgggtatttattatggtacgttattatcggaacacttggtagttgaatcgacctatagaaaaggagttagaatagtcccattggatagtttttttgaaggatatcttagtgcaaaagtatacatgttagagaatattcaagttatgaaaatagcagctgatacgtcattaactttactgggtattccatatggatttggtcatgatagaatgtattgttttaaattggtagctgaatgttataaaaatgcaggtgttgatacatcatctaaacgaatattgggcaaagatatttttctgagccaaaacttcacaaatgataatagatggataaagatatatgattctaataatttaacactttggcaaattgattaccttaaagggtgagttaatatgcataactactcctccgttattttttccctcgttctttttcttaacgttgtttgccatcactctcataatgtaaagatattctaaaatggtaaacttttgcatatcggacgcggaaattggtataaatgatgtaattgtattatttcccgtcaatggactagtcacagctccatcagttttatatcctttagagtatttctcactcgtgtctagaattctagagcattccatgatctgtttatcgttgatattggccggaaagatagattttttattttttattatattactattggcaattgtagatataacttctggtaaatatttttctaccttttcaatctcttctattttcaagccggctatatattctgctatattgttgctagtatcaataccttttctggctaagaagtcatatgtggtattcactatatcagttttaactggtagttccattagcctttccacttctgcagaataatcagaaattggttctttaccagaaaatccagctactataataggctcaccgatgatcattggcaaaatcctatattgtaccagattaatgagagcatatttcatttccaataattctgctagttcttgagacattgatttatttgatgaatctagctggttctctagatactctaccatttctgccgcatacaataacttgttagataaaatcagggttatcaaagtgtttagcgtggctagaatagtgggcttgcacgtattaaagaatgcggtagtatgagtaaaccgttttaacgaattatataatctccagaaatctgtggagttacatacgtgggccgaatgacatcgaagattgtccaatatttttaatagctgctccttgtccattatttctatatttgactcgcaacaattgtagataccattaatcaccgattcctttttcgatgctggacaataacacaattgtttagctttggactctatatattcagaattaatagatatatctctcaatacagattgcactatacattttgaaactatatcaaaaattgtagaacgacgctgttctgcagccatttaactttaaataatttacaaaaatttaaaatgagcatccgtataaaaatcgataaactgcgccaaattgtggcatatttttcagagttcagtgaagaagtgtctataaatgtagactcaactgatgagttaatgtatatttttgccgccttgggcggatctgtaaacatttgggccattatacctctcagtgcatcagtgttctaccgcggagccgaaaacattgtgtttaatcttccggtgtctaaggtaaaatcgtgtttgtgtagttttcacaatgatgccatcatagatatagaacctgatctggaaaataatctagtaaaactttctagttatcatgtagtaagtgtcgattgtaacaaggaactgatgcctattaggacagatactactatttgtctaagtatagatcaaaagaaatcttacgtgtttaattttcacaagtatgaagaaaaatgttgtggtagaaccgtcattcatctagaatggttgttgggctttatcaagtgtattagtcagcatcagcatttggctattatgtttaaagatgacaatattattatgaagactcctggtaatactgatgcattttccagggaatattctatgactgaatgttctcaagaactacaaaagttttctttcaaaatagctatctcgtctctcaacaaactacgaggattcaaaaagagagtcaatgtttttgaaactagaatcgtaatggataatgacgataacattctaggaatgttgttttcggacagagttcaatcctttaagattaacatctttatggcgtttttagactaatactttcaatgagataaatatgggtggtggagtaagtgttgcgctccctaaacgggatccgcctccgggagtacccactgatgagatgttactaaacgtggataaaatgcatgacgtgatagctcccgctaagcttttagaatatgtgcatataggaccgctaacaaaagataaagatgataaagtaaagaaaagatatccagagtttagattagtcagcacaggacccggtaatctttcggcattattaagacaatcgtataatggaaccgcacccaactgctgtcgcacttttaatcgtactcattattggaagaaggatggaaagatatcagataagtatgaagatggtgcagaattagaatcgtgttggcccgacgcccacgacactggaaaatgcgatgttgatttattcgactggtgtcagggggatacattcgatagaaacatatgccatcagtggatcggttcagcctttaataggagtgatagaactgtagatggtcaacaatcgctaataaatctgtataataagatgcaaacattatgtagtaaagatgctagtgtaccaatatgcgaatcatttttgcatcatttacgcgcacataatacagaagatagcaaagagatgatcgattatattttaagacaacagtccactgattttaaacagaaatatatgagatgtagttatcccaccagagataagttagaagagtcattaaaatatgcggaacctcgagaatgttgggatccagagtgttcgaatgccaatgtcaatttcttgctaacacgtaattataataatttaggactatgcaatattgtacgatgtaataccagcgtgaacaacttacagatggataaaacttcctcattaagattatcctgtggattaagcaatagtgatagattttctactgttcccgtcaatagagcaaaagtagttcaacataatattaaacactcgttcgacctaaaattgcatttgatcagtttattatctctcttggtaatatggatactaattgtagctatttaaatgggcgccgcagcaagcatacaaacgacggtgaatacactcagcgaacgtatctcgtctaaattagaacaagaagcgaatgctagtgctcaaacaaaatgtaatatagaaattggaaatttttatatccgacaaaaccatggatgtaacctcactgttaaaaatatgtgctccgcggacgcggatgctcagttggatgccgtgttatcagccgctacagaaacatatagtggattaactccggaacaaaaagcatacgtaccagctatgtttactgccgcgttaaacattcaaacgagtgtaaatactgttgttagagattttgaaaattatgtgaaacagacttgtaattctagtgcggtcgtcgataacaaattaaagatacaaaacgtaatcatagatgaatgttacggagccccaggatctccaacaaatttggaatttattaatacaggatctagcaaaggaaattgtgccattaaggcgttgatgcaattgacgactaaggccactactcaaatagcacctagacaagttgctggcgctggagttcaattttatatgatagttatcggtgttataatattggcagcgttgtttatgtactatgccaagcgtatgctattcacatccacccatgataaaatcaaacttattttagccaataaggaaaacgtccattggactacgtacatggacacattctttagaacttctccgatggttattgctaccacggatatgcaaaactgaaaatatattgataatattttaatagattaatatggaagttatcgctgatcgtctagacgatatagtgaaacaaaatatagcggatgaaaaatttgtagattttgttatacacggtctagagcatcaatgtcctgccatacttcgaccattaattaggttgtttattgatatactattatttgttatagtaatttatatttttacggtacatctagtacgtagaaattatcaaatgttgttggcgttggtggcgcaagtcatcacattaactattttttattactttatactataataatactagactgacttctaacaaacatctcgccggccataaataaatgcttgatattaaagtcttctatttctaacactattccatctgtggaaaataatactctgacattatcgctaattgacacatcggtgagtgatatgcctataaagtaataatcttctttgggcacatataccagtgtaccaggttctaacaacctatttactggtgctcccgtagcatactttttctttaccttaagaatatccaccgtttgcatagtcaatagcgacaagtgattttttatcaaccactcgaaaaagtaattggagtgttcatatcctctacgggctattgtctcatgaccgtgtatgaaatttaagtaacacgactgtggtagatttgttctatagagccggttaccgcaaatagatagaactaccaatacatctgtacaaatattaaacatcaattgattaacagaaaaaacaatgttcgttctgggaatagaaaccagatcaaaacaaaattcgttagaatatatgccacgtttatacatggaatataaaataactacagtttgaaaaataacagtattatttaaacatttaacttgcggggttaatctcacaactttactgtttttgaactgttcaaaatatagcatagatccatgagaaatacgtttagccgcctttaatagaggaaatcccaccgcctttctggatctcaccaacgacgatagttctgaccaacaactcaattctgcatcatccacctgttttaacatataataggctggagatagatatccatcattgcaatattccttctcgtaggcacacaatctaatattgataaaatctccattctcttctctgcatttattatcttgtcttggtttaggccttggtctattattaccatcgttgttgaatctactatttcggtcattaaatctttcatttcggcctggtatatttctatcacctcgtttggttggatttttgtctatattatcgtttgtaacatcggtacgggtattcatttatcacaaaaaaaacttctctaaatgagtctactgctagaaaacctcatcgaagaagataccatattttttgcaggaagtatatccgagtatgatgatttacaaatggttattgctggtgcaaaatccaaatttccaagatctatgctttctatttttaatatagtacctagaacgatgtcaaaatatgagttggtgttgattcataatgagaatatcacaggggcaatgtttaccacaatgtataatataagaaacaatttgggtctaggcgatgataaactaactattgaagccattgaaaattatttcttggatcctaacaatgaggttatgccgcttatcattaataatacggatatgactgccgtcattcctaaaaaaagtggtaggagaaagaataagaacatggttatcttccgtcaaggatcatcgcctatcttgtgtattttcgaaactcgtaaaaagattaatatttataaagaaaatatggaatccgcagctactgagtatacacctatcggagacaacaaggctttgatatctaaatatgcgggaattaatatcctgaatgtgtattctccttccacatccatgagattgaatgccatttacggattcaccaataaaaataaactagagaaacttagtactaataaggaactagaatcgtatagctctagccctcttcaagaacccattaggttaaatgattttctgggactattggaatgtgttaaaaagaatattcctctaacagatattccaacaaaggattgattactataaatggagaatgttcctaatgtatactttaatcctgtgtttatagagcccacgtttaaacattctttattaagtgtttataaacacagattaatagttttatttgaagtattcgttgtattcattctaatatatgtattttttagatctgaattaaatatgttcttcatgcctaaacgaaaaatacccgatcctattgatagattacgacgtgctaatctagcgtgtgaagacgataaattaatgatctatggattaccatggatgacaactcaaacatctgcgttatcaataaatagtaaaccgatagtgtataaagattgtgcaaagcttttgcgatcaataaatggatcacaaccagtatctcttaacgatgttcttcgcagatgatgattcattttttaagtatttggctagtcaagatgatgaatcttcattatctgatatattgcaaatcactcaatatctagactttctgttattattattgatccaatcaaaaaataaattagaagctgttggtcattgttatgaatctctttcagaggaatacagacaattgacaaaattcacagactctcaagattttaaaaaactgtttaacaaggtccctattgttacagatggaagggtcaaacttaataagggatatttgttcgactttgtgattagtttgatgcgattcaaaaaagaatcagctctagctaccaccgcaatagatcctgttagatacatagatcctcgtcgcgatatcgcattttctaacgtgatggatatattaaagtcgaataaagtgaacaataattaattctttattgtcatcatgaacggtggacatattcagttgataatcggccccatgttttcaggtaaaagtacagaattaattagacgagttagacgttatcaaatagctcaatataaatgcgtgactataaaatattctaacgataatagatacggaacgggactatggacacatgataagaataattttgaagcattggaagcaactaaactatgcgatgtcatggacgcagttacagatttctctgtgataggtatcgatgaaggacagttctttccagacattgttgaattctgtgagcgtatggcaaacgaaggaaagatagttatagtagccgcactcgatgggacatttcaacgtaaaccgtttaataatatattggatcttattccattatctgaaatggtggtaaaactaactgctgtgtgtatgaaatgctttaaggaggcttccttttccaaacgattgggtacagaaaccgagatagaaataataggaggtaatgatatgtatcaatcaatgtgtagaaagtgttacatcgactcataatattatatttttatctaaaaaactaaaaataaacattgattaaattttaatataatacttaaaaatggatgttgtgtcgttggataaaccgtttatgtattttgaggaaattgataatgaattagattatgaaccagaaagtgcaaatgaggtcgcaaaaaaactgccgtatcaaggacagttaaaactattactaggagaattattttttcttagtaagttacagcgacacggtatattagatggtgccaccgtagtgtatataggatctgctcccggcacacatatacgttatttgagagatcatttctataatttaggagtgatcatcaaatggatgctaattgacggccgtcatcatgatcctattctaaatggattgcgtgatgtgactctagtgactcggttcgttgatgaggaatatctacgatccatcaaaaaacaactgcatccttctaagattattttaatttctgatgtgagatccaaacgaggaggaaatgaacctagtacggcggatttactaagtaattacgctctacaaaatgtcatgattagtattttaaaccccgtggcgtctagtcttaaatggagatgcccgtttccagatcaatggatcaaggacttttatatcccacacggtaataaaatgttacaaccttttgctccttcatattcagctgaaatgagattattaagtatttataccggtgagaacatgagactgactcgagttaccaaatcggacgctgtaaattatgaaaaaaagatgtactaccttaataagatcgtccgtaacaaagtagttgtcaactttgattatcctaatcaggaatatgactattttcacatgtactttatgctgaggaccgtatactgcaataaaacatttcctactactaaagcaaaggtactatttctacaacaatctatatttcgtttcttaaatattccaacaacatcaactgaaaaagttagtcatgaaccaatacaacgtaaaatatctagcaaagattctatgtctaaaaacagaaatagcaagagatccgtacgcggtaataaatagaaacgtactactgagatatactaccgatatagagtataatgatttagttactttaataaccgttagacataaaattgattctatgaaaactgtgtttcaggtatttaacgaatcatccataaattatactccggtcgatgatgattatggagaaccaatcattataacatcgtatcttcaaaaaggtcataacaagtttcctgtaaattttctatacatagatgtggtaatctctgacttatttcctagctttgttagactagatactacagaaactaatatagttaatagtgtactacaaacaggcgatggtaaaaagactcttcgtcttcccaaaatgttagagacggaaatagttgtcaagattctctatcgtcctaatataccattaaaaattgttagatttttccgcaataacatggtaactggaatagagatagccgatagatctgttatttcagtcgctgattaatcaattaatagagataaaataagaatattataataatattataataatatatcttatatcttgtttagaaaaatgctaatattaaaatagctaacgctagtaatccaatcggaagccatttgatatctataatagggtatctaatttcctgattcagatagcggacagctatattctcggtagctactcgtttggaatcacaaacattatttacatctaatttactatctgtaatggaaacgtttcccaatgaaatggtacaatccgatacattgcatcttgatatatttttttttaaagaggctggtaacaacgcatcgcttcgtttacatggctcgtaccaacaataatagggtaatcttgtatctattcctatccgtatgatgcttttatcaggataaatacatttacatcgtatatcgtctttgttagcatcgcagaatgcataaatttgttcgtccgtcatgataaaaatttaaagtgtaaatataactattatttttatagttgtaataaaaagggaaatttgattgtataccttcggttctttaaaagaaactgacttgataaaatggctgtaatctctaaggttacgtatagtctatatgatcaaaaagagattaatgctacagatattatcattagtcatgttaaaaatgacgatgatatcggcactgtcaaagatggtagactaggggctatggatggggcattatgtaagacttgtgggaaaacggaattggaatgttttggacactggggtaaagtaagtatttataaaactcatatagttaagcctgaatttatttcagaaattattcgtttactgaatcatatatgtattcactgcggattattgcgttcacgagaaccgtattccgacgatattaacttaaaagagttatcaggacacgctcttaggagattaaaggataaaatagtatccaagaaaaagtcatgttggaacagcgaatgtatgcaaccgtatcaaaaaattacattttcaaagaaaaaggtttgttttgtcaacaagttggatgatattaatgttcctaattctctcatctatcaaaagttaatttctattcatgaaaagttttggccattattagaaattcatcaatatccagctaacttattttatacagactactttcccatccctccgctgattattagaccggctattagtttttggatagatagtatacccaaagagactaatgaattaacttacttattaggtatgatcgttaagaattgtaacttgaacgctgatgaacaggttatccagaaggcggtaatagaatacgatgatattaaaattatttctaataacactaccagtatcaatttatcatatatcacatccggtaaaaataatatgattagaagttatatcgtcgcccgacgaaaagatcagacggctagatctgtaattggtcccagtacatctatcaccattaatgaggtaggaatgcctgcatatattagaaatacacttacagaaaagatatttgttaatgcctttacagtggataaagttaaacaactattagcatcaaaccaagttaaattttactttaataaacgattaaaccaattaactagaatacgccaaggaaagtttatcaaaaataaaatacatttattgcctggtgattgggtagaagtagctgttcaagaatatacaagtattatttttggaagacagccgtctctacatagatataatgtcattgcttcttctatcagagatacagaaggcgatactatcaaaatatctcccggaattgctaactctcaaaatgctgatttcgacggagatgaagaatggatgatattggagcaaaatcctaaagctgtagttgaacaaagtattcttatgtatccgacgacgttactcaaacacgatattcacggagcccccgtttatggatctattcaagatgaaatcgtggcagcgtattcattgtttaggatacaagatctttgtttagatgaagtattgaacatcttggggaaatatggaagagagttcgatcctaaaggtaaatgtaaattcagcggtaaagatatctatacttacttgataggtgaaaagattaattatccggatctcttaaaggatggtgaaattattgcaaacgacgtagatagtaattttgttgtggctatgaggcatctgtcattggctggactcttatccgatcataagtcgaacgtggaagggatcaactttattattaagtcatcttatgtttttaagagatatctatctatttacggttttggggtgacattcaaagatctgagaccaaattcgacgttcactaataaattggaggccatcaacatagaaaaaatagaacttatcaaagaagcatacgccaaatatctcaaagatgtaagagatgggaaaatagttccattatctaaagctttagaggcggactacgtggaatccatgttatccaacttgacaaatcttaatatcagagagatagaagaacatatgagacaaacgctaatagatgatccagataataatctcctgaaaatggccaaggcgggttataaagtaaatcccacagaactaatgtatattctaggtacttatggacaacagaggatagatggcgaaccagcagagactcgagtattgggtagagtcttaccttactatcttccagactctaaggatccagaaggaagaggttatattcttaattctttaacaaaaggattaacgggttctcaatattacttttcaatgctggttgcaagatctcaatctactgatatcgtctgtgaaacatcacgtacaggaacactagctagaaaaatcattaaaaagatggaggatatggtggtcgatggatacggacaagtagttataggtaatacactcatcaagtacgccgccaattataccaaaattctaggctcggtatgtaaacctgtagatcttatctatccagatgagtccatgacttggtatttggaaatcagtgccttgtggaataaaataaaacagggattcgtttactctcagaaacaaaaacttgcaaagaagacattggcgccgtttaatttcctagtatttgtcaaacccaccactgaggataatgccattaaggttaaggatctgtacgatatgatccacaacgtcatcgatgatgtgagagagaagtacttctttaccgtatctaatatagattttatggagtatatctttttgactcatctgaatccttctagaattagaattacaaaggaaacggctattaccatctttgaaaagttctatgaaaaactcaattatactctaggtggcggaactcctattggaattatttctgcacaggtattgtctgagaagtttacacaacaagccctgtccagttttcacactactgaaaagagtggtgccgtcaaacaaaaacttggtttcaacgagtttaataacttgactaatttgagtaaaaataagaccgaaattatcactctggtatccgatgatatctctaaacttcaatctgttaagattaatttcgaatttgtatgtttgggagaattaaatccagacatcactcttcgaaaagaaacagatagatatgtagtagacataatagtcaatagattatacatcaagagagcagaaattaccgaattagtcgtcgaatatatgattgaacgattcatctcctttagcgtcattgtaaaggaatggggtatggagacattcatcgaggacgaggataatatcagatttactgtctatctaaatttcgttgaaccagaggaattgaatcttagtaagtttatgatggttcttccgggtgctgccaacaagggcaaaattagtaaattcaagattcctatctctgattatacaggttatgacgacttcaatcaaccaaaaaagctcaataagatgactgtagaacttatgaatctaaaagaattggtttcatttgatttggaaaacgttaacgtgtatcctggagtatggaatacatacgatatcttcggcatcgaggccgctcgtggatacttgtgcgaagccatgttaaacacctatggagaaggtttcgattatctgtatcagccttgtgatcttctcgctagtttactatgtgctagttacgaaccagaatcagttaataaattcaagttcggcgcagctagtactcttaagagagctactttcggagacaataaagcattgttaaacgcggctcttcataaaaagtcagaacctattaacgataatagtagctgccacttttttagcaaggtcccaaatataggaactggatattacaaatactttatcgacttgggtcttctcctgagaatggaaaggaaactatctgataagatatcttctcaaaagatcaaggagatggaagaaacagaagacttttaattcttatcaatcacatatttttctatgatctgtcttttaaacgatggattttccacaaatgcacctcttaagtccctcatagaatgatacacgtataaaaaatatagcataggcgacgactccttatttttagacattagatatgccaaaatcatagccccgcttctatttactcccgcagcacaatgaaccaacacaggctcgttttgttgatcacatttagataaaaaggcggtcacgtcgtcaaaatatttactaatgtcggtagttgtatcatctaccaacggtatatgaataatattaatattagagttaggtaatgtatatttatccatcgtcaaatttaaaacatatttgaacttaacttcagatgatggtgcatccatagcatttttataatttcccaaatatacattattggttactcttgtcattatagtgggagatttggctctgtgcatatctccagttgaacgtagtagtaagtatttatacaaacttttcttatccatttataacgtacaaatggataaaactactttatcagtaaacgcgtgtaatttagaatacgttagagaaaaggctatagtaggcgtacaagcagccaagacatcaacacttatattctttgttattatattggcaattagtgcgctattactctggtttcagacgtctgataatccagtctttaatgaattaacaagatatatgcgaattaaaaatacggttaacgattggaaatcattaacggatagcaaaacaaaattagaaagtgatagaggtagacttctagccgctggtaatgatgatatattcgaattcaaatgtgtggatttcggcgcctattttatagctatgcgattggataagaaaacatatctgccgcaagctattaggcgaggtactggagacgcgtggatggttaaaaaggcggcaaaggtcgatccatctgctcaacaattttgtcagtatttgataaaacacaagtctaataatgttattacttgtggtaatgagatgttaaacgaattaggttatagcggttattttatgtcgccgcattggtgttccgatcttagtaatatggaatagtgttagataaatgcggtaacaaatgttcctgtaaggaaccataacagcttagatttaacgttaaagatgagcataaacataataaacaaaattacaatcaaacctataacattaatatcaaacaatccaaaaaatgaaatcagtggagtagtaaacgcgtacataactcctggataacgtttagcagctgccgttcctattctagaccaaaaattcggtttcatgttttcgaaacggtattctgcaacaagtcgaggatcgtgttctacatatttggcggcgttatccagtatctgcctattgatcttcatttcgttttcgattctagccagttcaaaataaaatcccgatgatagacctccagactttataatttcatctacgacgttcagtgccgtagtaactctaataatataggctgataagctaacatcataccctcctgtatatgtgaatatggcatgatctttgtccattactagctcggttttaactttatttcctgtaataatttctctcatctgtaggatatctattttcttgtcatgcattgccttcaagacgggacgaagaaacgtaatatcctcaataacgttatcgttttctacaacaactacatactctacctttttattttctagctcggtaaaaaatttagaatcccatagggctaaatgtctagcgatatttcttttcgtttcttctgtacacatagtgttacaaaaccctgaaaagaagtgagtatacttgtcatcatttctaatgtttcctccagtccactgtataaacacataatccttgtaatgatctggatcatccttgactaccacaacatctcttttttctggtataacttcattgtccttcacatcatcgaacttctgatcattaatatgctcatgaacattaggaaatgtttctgatggaggtctagcaataactggcacaacaataataggagttttcgccgccgccatttagttattgaaattaatcatatacaactctctaatacgagttatattttcgtctatccattgtttcacattgacatattttgacaaaaagatataaaatgcgtattctaatgcttctctgtttaacgaattactaaaatatacaaatacgtcgctgtctggcaataaatgatatcttagaatattgtaacaatttattttgtattgtacatgttcatgatctatgagttcttcttcgaatggcatcggatctccaaatctgaaaacgtataaataggagttagaataataatatttgagagtattggtaatgtacaaactctttagcggtataattagtttttttctctcgatttctatttttagatgtgatggaaaaatggccaattttgtagcattagtatcatgaactctaatcaaaatcttaatatcttcgtcacacgttagctctttgaagtttttaagagatgcatcagttggttctacagatggagtaggtgcaacaattttttgttcgacacatgtatgtactggagccattgtcttaactataatggtgcttgtatcgaaaaactttaatgcagataacggaagctcttcgccgcgactttctacgtcgtagttgggttctaacgccgatctctgaatggatactagttttctaagttctaatgtgattctctgaaaatgtaaatccaattcctccggcattatagatgtgtatacatcggtaaataaaactatagtatccaacgatcccttctcgcaaattctagtcttaaccaagaaatcgtatataactacggagatggcgtatttaagagtggattcttctaccgttttgttcttggatttcatataagaaactataaagtccgcactactgttaagaatgattactaacgcaactatatagtttaaattaagcatcttggaaacataaaataactctgtagacgatatttgactttcgaataagtttgcagacaaacgaagaaagaacagacctctcttaatttcagaagaaaactttttttcgtattcctgacgtctagagtttatatcaataagaaagttaagaattagtcgattaatgttgtatttcattacccaagtttgagatttcataatattatcaaaagacatgataatattaaagataaagcgctgactatgaacaaaatagctatatggttcgctcaagaatatagtcttgttaaacgtggaaacgataactgtatttttaatcacgtccgcggcatctagattaaatataggtatatttatcccacacactctacaatatgccacaccatcttcataataaataaattcgttagcaaaattattaattttagtgaaatagttagtgtcaactttcatagcttccttcaatctaatttgatgctcacacggcgcgaattctactctaacatccattttccatgcctcaggttcatcgatctctataatatctagtttcttgcgtttcacaaacacaggctcgtctctcgcgatgagatctgtatagtaactatgtaaatgataactagatagaaagatgtagctatatagatgacgatcctttaagagaggtatgatgactttaccccaatcagatagactgttgttatggtcttcggaaaaagaatttttataaatttttccagtattttccaaatatacgtacttgacatctaaaaaatccttaatgataataggaatggataatccgtctattttataaagaaatacatatcgcacattatacttttttttggaaatgggaataccgatgtgtctacataaatacgcaaagtctaaatattttttagagaatcttagttggtccaaattcttttccaagtacggtaatagatttttcatattgaacggtatcttcttgatctctggttctaattccgcattaaatgatgaaactaagtcactatttttataactaacgattacatcacctctatcatcatttaccaggatactgatcttcttttgtcgtaaatacatgtctaatgtgttaaaaaaaagatcatacaagttatacatcatttcatctgtagtattcttgtcattgaaggataaactcgtactaatctcttctttaacagtctgttcaaatttatatcctatatacgaaaaaatagcaaccagtgtttgatcatccgcgtcaatattctgtactatcgtagtgtataacaatcttatatcttcttctgtgatagtcgatacgttataaaggttgataacgaaaatatttttatttcgtgaaataaagtcatcgtaggattttggacttatattcgcgtctagtagatatgcttttatttttggaatgatctcaattagaatagtctctttagagtccatttaaagttacaaacaactaggaaattggtttatgatgtataatttttttagtttttatagattctttattctatacttaaaaaatgaaaataaatacaaaggttcttgagggttgtgttaaattgaaagcgagaaataatcataaattatttcattatcgcgatatccgttaagtttgtatcataatggcgtggtcaattacgaataaagcggatactagtagtttcacaaagatggctgaaatcagagctcatctaagaaatagcgctgaaaataaagataaaaacgaggatattttcccggaagatgtaataattccatctactaagcccaaaacaaaacgaaccattacgcctcgtaaaccagcggctactaaaagatcaaccaaaaaggataaagaaaaggaggaagtggaagaagaagtagttatagaggaatatcgtcaaacaactgaagaaaattctccacctccgtcatcatctcctagagtcggcgacattgtagaaagcgtggccgctgtagagctcgatgatagcgacgggggtgatgatgaacctatggtacaagttgaagctggtaaagtaaatcatagtgctagaagcgatctctctgacctaaaggtggctaccgacaatatcgttaaagatcttaagaaaattattactagaatctctgcagtatcgactgttctagaggatgttcaagcagctggtatctctagacaatttacttctatgactaaagctattacaacactatctgatctagtcaccgagggaaaatctaaagttgttcgtaaaaaagttaaaacttgtaagaagtaaatgcgtccacttttttataaagatggtaaactgtttaccgataataattttttaaatcctgtatcagactataatccagcgtatgaggttttgcaacatgttaaaattcctactcatttaacagatgtagtagtatatgaacaaacgtgggaagaggcgttaactagattaatttttgtgggaagtgattcaaaaggacgtagacaatacttttacggaaaaatgcatgtacagaatcgcaacgctaaaagagatcgtatttttgttagagtatataatgttatgaaacgaattaattgttttataaacaaaaatataaagaaatcgtccacagattccaattatcagttggcggtttttatgttaatggaaactatgttttttattagatttggtaaaatgaaatatcttaaggagaatgaaacagtagggttattaacactaaaaaataaacacatagaaataagtcccgatgaaatagttatcaagtttgtaggaaaggacaaagtttcacatgaatttgttgttcataagtctaatagactatataaaccgctattgaaactgacggatgattctagtcccgaagaatttctgttcaacaaactaagtgaacgaaaggtatacgaatgtatcaaacagtttggtattagaatcaaggatctccgaacgtatggagtcaattatacgtttttatataatttttggacaaatgtaaagtccatatctcctcttccgtcaccaaaaaagttaatagcattaactatcaaacaaactgctgaagtggtaggtcatactccatcaatttcaaaaagagcttatatggcaacaactattttagaaatggtaaaggataaaaattttttagacgtggtatctaaaactacgttcgatgaattcctatctatagtcgtagatcacgttaaatcatctacggatggatgatatagatctttacacaaataattacaagaccgataaatggaaatggataagcgtatgaaatctctcgcaatgacagctttcttcggagagctaaacacattagatattatggcattgataatgtctatatttaaacgccatccaaacaataccattttttcagtggatacggatggtcagtttatgattgatttcgaatacgataattataaggcttctctatatttggatctgacccttattccgatatctggagatgaatgcaagactcacgcatcgagtatagccgaacaattggcgtgtgtggatattattaaagaggatattagtgaatatatcaaaactactccccgtcttaaacgttttataaaaaaataccgcaatagatcagacactcgtatcagtcgagatacagaaaagcttaaaatagctctagctaaaggcatagattacgaatatataaaagacacttgttaataagtaaatgaaaaaaaactagtcgtttatgataaaacacgatggatgctaatatagtatcatcttctactattgcgacgtatatagacgcgttagcaaagaatgcttcagaattagaacagaggtctaccgcatacgaaataaataatgaattggaactagtatttattaagccgccattgattactttgacaaatgtagtaaatatctccacgattcaggaatcgtttattcgatttaccgttactaataaggaaggtgtcaaaattagaactaagattccattatctaaggtacatgggctagatgtaaaaaatgtacagttagtagatgctatagataacatagtttgggaaaagaaatcattagtgacggaaaatcgtcttcacaaagaatgcttgttgagactatcgacagaggaacgtcatatatttttggattacaagaaatatggatcctctatccgattagaattagtcaatcttattcaagcaaaaacaaaaaactttacgatagactttaagctaaaatattttctaggatccggtgcccaatctaaaagttctttgttgcacgctattaatcatccaaagtcgaggcctaatacatctctggaaatagaatttacacctagagacaatgaaacagttccatatgatgaactaataaaggaattgacgactctctcgcgtcatatatttatggcttctccagagaatgtaattctttctccgcctattaacgcacctataaagacttttatgttgcctaaacaagatatagtaggtctggatctggaaaatctatatgccgtaactaagactgacggcattcctataactatcagagttacatcaaaagggttgtattgttattttacacatcttggttatattattagatatccagttaagagaataatagattccgacgtagtagtctttggtgaggcagttaaggataagaactggaccgtatatctcattaagctaatagagccaaatgcaatcggtgatagactagaagaaagtaagtatgtcgaatctaaactagtggatatttgtgatcggatagtattcaagtcaaagaaatatgaaggtccgtttactacaactagtgaagtcgtcgatatgttatctacatatttaccaaagcaaccagaaggtgttattctgttctattcaaagggacctaaatctaacattgattttaaaatcaaaaaggagaatactatagaccaaactacaaatgtagtatttaggtacatgtccagtgaaccaattatctttggagagtcgtctatctttatagagtataagaaatttaccaacgataaaggctttcctaaagaatatggttctggtaagattgtgttatacaacggcgttaattatctaaataatatctattgtttggaatatattaatacacataatgaagtgggtattaagtccgtggttgtacctattaagtttatagcagaattcttagtcaatggagaaatacttaaacctagaatcgataaaaccatgaaatatattaactcagaagactattatggaaatcaacataatatcatagtcgaacatttaagagatcaaagcatcaaaataggagatgtctttaacgaggataaactatcggatgtgggacatcaatacgccaataatgataaatttagattaaatccagaagttagttattttacgaataaacgaactagaggaccgttgggaattttatcaaactacgtcaagactcttcttatttctatgtattgttccaaaacatttttagacgattccaacaaacgaaaggtattggcgattgattttggaaacggtgctgacctggaaaaatacttttatggagagattgcgttattggtagcgacggatccggatgctgatgctatagctagaggaaatgaaagatacaacaaattaaattctggaattaaaaccaagtactacaaatttgactacattcaggaaactattcgatccgatacatttgtctctagtgtcagagaagtattctattttggaaagtttaatatcattgactggcagttcgctattcattattcgtttcatccgagacattatgctacagtcatgaataacttatccgaactaactgcttctgggggcaaggtattgattactaccatggatggagacaaattatcaaaattaaccgataaaaagacttttataattcataagaatctacctagtagcgaaaactatatgtctgtagaaaaaatagctgatgatagaatattggtatataatccatcaacaatgtctacaccaatgactgaatacattatcaaaaagaatgatatagtcagagtgtttaacgaatacggatttgttcttgtagacaacattgatttcgctacaattattgaacgaagtaaaaagtttattaatggcgcatctacaatggaagatagaccgtctacaagaaactttttcgaactaaatagaggagccattaaatgtgaaggtttagatgtcgaagacttacttagttactatgttgtttatgtcttttctaagcggtaaataataatatggtatgggttctgatatccccgttctaaatgcattaaataattccaatagagcgatttttgttcctataggaccttccaactgtggatactctgtattgttaatagatatattaatacttttgtcgggtaacagaggttctacgtcttctaaaaataaaagtttgataacatctgacctgttcataaataaaaacttggcaattctatatatactcttattatcaaatctagccgctgtcttatagatgtgagctactgtaggtgtaccatttgattttctttctaatactatatatttctctcgaagaagttcttgcacatcatctgggaataaaatactactgttgagtaaatcagttattttttttatatcgatattgatggacatttttatagttaaggataataagtatcccaaagtcgataacgacgataacgaagtatttatacttttaggaaatcacaatgactttattagatcaaaattaacaaaattaaaggagcatgtatttttttctgaatatattgtgactccagataaatatggatctttatgcgtcgaattaaatggatctagttttcagcacggtggtagatatatagaggtggaggaatttatagatgctggaagacaagttagatggtgttctacatccaatcatatatctgaagatatacccgaagatatacacactgataaatttgtcatttatgatatttatacgtttgattcgttcaagaataaacgattggtatttgtacaggtacctccatcattaggagatgatagctatttgactaatccgttcttgtctccgtattatcgtaattcagtagcccggcaaatggtcaataatatgatttttaatcaagattcatttttaaaatatttattagaacatctgattagaagccactatagagtttctaaacatataacaatagttagatacaaggataccgaagaattaaatctaacaagaatatgttataatagagataagtttaaggcgtttgtattcgcttggtttaacggcgtttcggaaaatgaaaaggtactagatacgtataaaaaggtatctgatttgatataatgaactcggtaactgtgtcgcacgcaccatatactattacttatcacgatgattgggaacccgtaatgaatcaattagtagagttttataacgaagtatccagctggctgctacgagatgagacgtcgcctattcctgataagttctttatacagttgaaacaaccgcttagaaataagcgagtatgtgtgtgtggtatagatccgtacccgaaagatggaactggtgtaccgttcgaatcaccaaattttacaaaaaaatcaattaaggagatagcttcatccatatctagattaacaggagtaattgattataaaggttataaccttaatataatagacggggttataccctggaattattacttaagttgtaaattaggagaaacaaaaagtcacgcgatttactgggataagatttctaagttactgctgcagcatataactaaacacgttagtgttctttattgtttgggtaaaacagatttctcgaatatacgggcaaagttagaatccccggtaactaccatagtgggatatcatccagcggctagagaccaccaattcgagaaagatcgatcatttgaaattatcaacgttttactggaattagataacaaggcacctataaattgggctcaagggtttatttattaatgctttagtgaaattttaacttgtgttctaaatggatgcggatattagaggtaatgatattatctttgttcttaagactataggtgtcccatcggcatgtagacaaaatgaagatccgagattcgtagaagcatttaaatgcgacgagttagaaagatatattgagaataatccagaatgtacactattcgaaagtcttagggatgaggaagcatactctatagtcagaattttcatggatgtagatttagacgcatgtctagacgaaatagattatttaacggctatacaagattttattatcgaggtgtcaaactgtgtagctagattcgcgtttacagaatgcggtgccattcatgaaaatgtaataaaatccatgagatctaatttttcattaactaagtctacaaatagagataaaacaagctttcatatcatctttttagatacgtataccactatggatacattgatagctatgaaacgaacacttttagaattgagtagatcatctgaaaatccactaaccagatcgatagacactgccgtatataggagaaaaacaactcttcgggttgtaggtactaggaaaaatccaaattgtgacactattcatgtaatgcaaccaccgcatgataatatagaagattacctattcacttacgtggatatgaacagcaatagttattacttttctctacaacgacgattggaggatttagtttcagataagttatgggaaccatggtttatttcattcgaagacgctataaaaagagtttcaaaaatattagttaattctataataaactttaacgatcttgatgaaaataattttactacggtaccactagtcatagattacgtaacaccttgtgcattatgtaaaaaacgatcgcataaacatccgcatcaactatcgttggaaaatggtgctattagaatttacaaaactggtaatccgcatagttgtaaagttaaaattgttccattggatggcaacaaactgtttaatatcgcacaaagaattttagacactaactctgttttattaaccgaacgaggagatcatatagtttggattaataattcatggaaatttaatagcgaagaaccgttgataacaaaactaattctgtcaataagacatcaactacctaaggaatattcaagcgaattactctgcccgaggaaacgaaagactgtagaagctaacatacgagacatgttagtagattcagtagagaccgatacctatccggataaacttccgtttaaaaatggtgtattggacctggtagacggaatgttttactctggagatgatgctaaaaaatatacatgtactgtatcaaccggatttaaatttgacgatacaaagttcgtcgaagacagtcctgaaatggaagagttaatgaatatcattaacgatatccaaccattaacggatgaaaataagaaaaatagagagttgtacgaaaaaactttatctagttgtttatgcggtgctaccaaaggatgtttaacattcttttttggagaaactgcaactggaaagtcgacaaccaaacgtttgttaaagtctgctatcggtgacctgtttgttgagacgggtcaaacaattttaacagatgtattggataaaggacctaatccatttatcgctaacatgcacttgaaaagatctgtattctgtagcgaactacctgattttgcatgtagtggatcaaagaaaattagatctgacaatattaaaaagttgacagaaccttgtgtcattggaagaccgtgtttctccaataaaattaataatagaaaccatgcgacaataattattgataccaattacaaacctgtatttgataggatagataacgcattaatgagaagaattgccgtcgtgcgattcagaacacacttttctcagccttctggtagagaggctgctgaaaataatgacgcgtacgataaagtcaaactattagacgagggattagatggtaaaatacagaataatagatatagattcgcatttctatacttgttggttaaatggtacaaaaaatatcatattcctattatgaaactatatcctacaccggaagaaattccggactttgcattctatctcaaaataggtactctgttggtctctagctctgtaaagcatattccattaatgacggacctctccaaaaaggggtatatattgtacgataatgtggtcactcttccgttgactactttccaacagaaaatatccaagtattttaattctagactatttggacacgatatagagagcttcatcaatagacataagaaatttgccaatgttagcgatgaatatctgcaatatatattcatagaggatatttcatctccgtaaatatatactcgtatatttatagaagatatcacatatctaaatgaataccggaatcatagatttatttgataatcatgttgatagtataccgactatattacctcatcagttagctactttagattatctagttagaactatcatagatgagaacagaagcgtgttattgttccatattatgggatcgggtaaaacaataatcgctttgttgttcgccttggtagcttccagatttaaaaaggtttacattctagtgccgaacatcaacatcttaaaaattttcaattataatatgggtgtagctatgaacttgtttaatgacgaattcatagctgagaatatctttattcattccacaacaagtttttattctcttaattataacgataacgtcattaattataacggattatctcgctacaataactctatttttatcgttgatgaggcacacaatatctttgggaataatactggagaacttatgaccgtgataaaaaataaaaacaagattccttttctactattgtctggatctcccattactaacacacctaatactctgggtcatattatagatttaatgtccgaagagacgatagattttggtgagattattagtcgtggtaagaaagtaattcagacacttcttaacgaacgcggcgtgaatgtgctcaaggatttgcttaaaggaagaatatcatattacgaaatgccggataacgatctaccaacgataagatatcacggacgtaagtttctagatactagagtagtatattgtcacatgtctaaacttcaagagagagattatatgattactagacgacagctatgttatcatgaaatgtttgataaaaatatgtataacgtgtcaatggcagtattgggacaacttaatctgatgaataatttagatacgttatttcaggaacaggataaggaattgtacccaaatctgaaaataaataatggcgtgttatacggagaagaattggtaacgttaaacattagttccaaatttaagtactttatcaatcggatacagacactcaacggaaaacattttatatacttttctaattctacatatggcggattggtaattaaatatatcatgctcagtaatggatattctgaatataatggttctcagggaactaatccacatatgataaacggcaaaccaaaaacatttgctatcgttactagtaaaatgaaatcgtctttagaggatctattagatgtgtataattctcctgaaaacgatgatggtagtcaattgatgtttttattttcgtcaaacattatgtccgaatcctatactctgaaagaggtaaggcatatttggtttatgactatcccagatactttttctcaatacaaccaaattcttggacgatctattagaaaattctcttacgccgatatttctgaaccagttaatgtatatcttttagccgccgtatattccgatttcaatgacgaagtgacgtcattaaacgattacacacaggatgaattgattaatgttttaccatttgacatcaaaaagctgttgtatctaaaatttaagacgaaagaaacgaatagaatatactctattcttcaagagatgtctgaaatgtattctcttccaccacatccatcaattgtaaaagttttattgggagaattgatcagacaatttttttataataattctcgtattaagtataacgactccaagttacttaaaatggttacatcagttataaaaaataaagaagacgctaggaattacatagatgatattgtaaacggtcacttctttgtatcgaataaagtatttgataaatctcttttatacaaatacgaaaacgatattattacagtaccgtttagactttcctacgaaccatttgtttggggagttaactttcgtaaagaatataacgtggtatcttctccataaaactgatgagatatataaagaaataaatgtcgagctttgttaccaatggataccttccagttacattggaaccacatgagctaacgttagacataaaaactaatattaggaatgccgtatataagacgtatctccatagagaaattagtggtaaaatggccaagaaaatagaaattcgtgaagacgtggaattacctctcggtgaaatagttaataattctgtagttataaacgttccgtgtgtaataacctacgcgtattatcacgttggggatatagtcagaggaacattaaacatcgaagatgaatcaaatgtaactattcaatgtggagatttaatctgtaaactaagtagagattcgggtactgtatcatttagcgattcaaagtactgcttttttcgaaatggtaatgcgtatgataacggcagcgaagtctccgccgttctaatggaggctcaacaaggtatcgaatctagttttgtttttctcgcgaatatcgtcgactcataagaaagagaatagcggtaagtataaacacgaatactatggcaataattgcgaatgttttattcccttcgatatatttttgataatatgaaaaacatgcctctctcaaatcagacaaccatttcataaaatagttctctcgcactggcgaagtggttacagctcgtataatctccccagaataatatatttctgtgtcgtcattcaatttatacggatttctatagttctctgttatataatgcggttttccctcatgattagacgacgacaatagtgttctaaatttagatagttgatcagaatgaatgtttattggcgttggaaaaattatccatgccgcgtctgcagagtggttgatagttgttcctagatatgtaaaataatccaacgtgctaggcaacaaattgtctagataaaatactgaatcaaacggcgtagacgtattagcgtatctaatggaatccaattgattgactatcttttgaaaatatacatttttatgatccgatacttgtaagaatatagcaacaatgataattccatcatcgtgtttttttgcctcttcataagaactatattttttcttattccaatgaacaagattaatctctccagagtatttgtatacatctatcaagtgattggatccataatcgtcttcctttccccaatatatatgtagtgatgataacacatattcattggggagaaaccctccacttatgtacccgcctttaaaattaatccttactagttttccagtattctgaatagtggttggttttgactcattataatgtatgtctaacggcttcaatcgcacgttagaaatcgcttttttagtttctatattaataggagatagttgttgaggcatagtaaaaatgaaatgataactgtttagaaatagctcttagtatgggaattacaatggatgaggaagtgatatttgaaactcctagagaattaatatctattaaacgaataaaagatattccaagatcaaaagacacgcacgtgtttgctgcgtgtataacaagtgacggatatccgttaataggagctagaagaacttcattcgccttccaggcgatattatctcaacaaaattcagattctatctttagagtatccactaaactattacggtttatgtactacaatgaactaagagaaatctttagacggttgagaaaaggttctatcaacaatatcgatcctcacttcgaagagttaatattattgggtggtaaactagataaaaaggaatctattaaagattgtttaaaaagagaattaaaagaggaaagtgatgaacgtataacggtaaaagaattcggaaatgtaattctaaaacttacgacacgtgataaattatttaataaagtgtatataggttattgtatggcatgttttattaatcaatcgttggaggatttatcgcatactagtatttacaatgtagaaattagaaagattaaatccttaaatgattgtattaacgatgataaatacgaatatctgtcttatatttataatatgctagttaatagtaaatgaccttttacagatctagtataattagtcagattattaagtataatagacgactagctaagtctattatttgcgaagatgactctcaaattattacacttacggcattcgttaaccaatgcctatggtgtcataaacgagtatccgtatccgctattttattgactaatgataacaaaatattagtgtgtaacagacgagatagttttctctattctgaaataattagaactagaaacatgtttagaaaaaaacgattatttctgaattattctaattatttgaacaaacaggaaagaagtatactatcgtcatttttttctctagatccagctactactgataatgatagaatagacgctatttatccgggtggtatacccaaaaggggcgagaacgttctagagtgtttatccagggaaatcaaagaagaagttaatatagacaattcttttgtattcatagacactcgtttttttattcatggtatcatagaagataccattattaacaaattttttgaggtaattttctttgtcggaagaatatctctaacgagtgatcaaattattgatacctttaaaagtaatcatgaaatcaaggatctgatatttttagatccgaattcgggtaatggactacaatatgaaattgcaaaatatgctctagatactgcaaaacttaaatgttacggccatagaggatgttattacgaatcattaaaaaaattaacggatggatttattgattagaaaatataaattaatttaccatcgtgtatttttataacaggattgtccggcatatcatgtagatagttaccgtctacatcgtatactcgaccatctacgcctttaaatcctctatttattgacattaatctactagaattggaataccaaatattagtaccctcaattagtttattggtaatattttttttagacgatagatcgattgctcttgaaaccaatgttttccaaccggactcattgttgatcggtgagaagtctttttcattagcatgaatccattccaatgatgtatgtttaaacactctaaacaattgaacaaattcttttgatttgctttgaatgatttcaaataggtcttcgtctacagtaggcatactattagataatctagccattataaagtgcacgtttacatatctacgttctggaggagtaagaacgtgactattgagacgaatggctcttcctactatctgacgaagagacgcctcgttccatgtcatatctagaataaagatatcattgattgagaagaaactaataccctcacctccactagaagagaatacacatgttttaatgcattctccgttagtgtttgattcttggttaaactcagccaccgccttgattctagtatctttcgttctagatgagaactctatattagagataccgaatactttgaaatatagtaataagatttctattcctgactgattaacaaatggttcaaagactagacatttaccatgtgatgctaatattcccaaacatacatctatgaatttgacgcttttctcttttaattcagtaaatagagagatatccgccgcactagcatcccctcccaatagttctccccttttaaaggtatctaatgcggatttagaaaattctctatctcttaatgaatttttaaaatcattatatagggttgctatctcttgcgcgtattcgccgggatcacgattttgtctttcaggaaagctatcgaacgtaaatgtggtagccatacgtctcagaattctaaatgatgatataccagtttttatttctacgagtttagccttttgataaatctcttcttgcttttttgacatattaacgtatcgcattaatactgttttcttagcgaatgatgcagacccttctacatcatcaaaaatagaaaactcgttattaactatatacgaacatagtcctcctagtttggatactaattctttttcatcgactagacgtttgttctcaaatagcgattggtgttgtaaggatcctggtcgcagtaagttaaccaacatggtaaattcttgcacactattgacgacaggtgtagccgataaacaaatcatcttatggttttttaacgcgatggtcttagataaaaaattatatactgaacgagtaggacggatcttaccatcttctttgattaatgatttagaaatgaagttatgacattcatcaatgatgacgcatattctactcttggaattaatagttttgatattagtaaaaaatttatttctaaaattttgatcatcgtaattaataaaaatacaatccttcgttatctctggagcgtatctgagtatagtgttcatccaaggatcttctatcaaagcttttttcaccaataagataatagcccaattcgtataaatatccttaagatgtttgagaatatatacagtagtcattgttttaccgacacctgtttcatggaacaataaaagagaatgcatactgtctaatcctaagaaaactcttgctacaaaatgttgataatctttgaggcgtactatgtctgaccccatcatttcaacgggcatattagtagttctacgtaaggcataatcgatataggccgcgtgtgatttactcatttatgagtgataagtaataactatgttttaaaatcacagcagtagtttaactagtcttctctgatgtttgttttcgatactttttgaatcagaagtcatactagaataaagcagcgagtgaacgtaatagagagcttcgtacactctattcgaaaactctaaaaacttattaatgaattccgtatccactggatcgtttaaaatactaaattgaacactgttcacatccttccaagaagaagacttagtgacggacttaacatgagacataaataaatccaaattttttttacaaacatcactagccaccataatggcggtatctttcaaccagctatcgcttacgcattttagcagtctaacatttttaaagagactacaatatattctcatagtatcgattacacctctaccgaatagagtgggaagtttaataatacaatatttttcgtttacaaaatcaaataatggtcgaaacacgtcaaaggttaacattttataatcgctaatgtataaattgttttcagttagatgattattagatttaatggcgtctcgttcacgtttgaacagtttattgcgtgcgctgaggtcggcaactacggcgtccgctttagtactcctaccgtaatactttacgctattaatctttaaaatttcatagactttatctagatcgctttctggtaacatgatatcatgtgtaaaaagttttaacatgtctgttggcattctatttagatcattaactctagaaatctgaagaaagtaattagctccgtattccagactaggtaatgggcttttacctaaagacaagttaagttctggcaatgtttcataaaatggaagaaggacatgcgtcccctcccgaatattttttacaatttcatccatttacaactctatagtttgttttcattattattagttattatctcccataatcttggtaatacttaccccttgatcgtaagataccttatacaggtcattacatacaactaccaattgtttttgtacataatagattggatggttgacatccatggtggaataaactactcgaacagatagtttatctttccccctagatacattggccgtaatagttgtcggtctaaagaatatctttggtgtaaagttaaaagttagggttcttgttccattattgctttttgtcagtagttcattataaattctcgagatgggtccgttctctgaatatagaacatcatttccaaatctaacttctagtctagaaataatatcggtcttattcttaaaatcgattcctttgatgaagggatcgttaataaacaaatccttggcctttgattcggctgatctattatctccgttatagacgttacgttgactggtccaaagacttacaggaatagatgtatcgatgatgttgatagtatgtgatatgtgagcaaagactgttctcttggtggcgtcactatatgttccagtaatggcggaaaactttttagaaatgttatatataaaagaattttttctggttccaaacattagcagattagtatgaagataaacactcatattatcaggaacattatcaatttttacatacacatcagcatcttgaatagaaacaataccatcttctggaacctcgacgatctcggcagactccggataaccagtcggtggaccatcgctaacaataactagatcatccaacaatctactcacatatgcgtcaatataatctttttcatcttgtgagtaccctggatacgaaataaatttattatccgtatttccataataaggtttagtataaacagagagagatgttgctgcatgaacttcggttactgtcgccgttggttggtttatttgacctattactctcctaggtttctctataaatgatggtttaatttgtacattcttaaccatatatccaataaagctcaattcaggtacataaacaaattctttgttgaacgtttcaaagtcgaacgaagagtcacgaataacaatatcggatactggattgaaggtcaccgttacggtaatttttgaatcggatagtttaagactactgaatgtatcttccacatcaaacggagttttaatataaacgtatactgtagatggttctttgatagtgtcattaggagttaggccaatagaaatatcattaagttcactagaatatccagaatgtttcaaagcaattgtgttgttgatacaattattatataattcttcgccctcaatttcccaaataacaccgttacacgaagagatagatacgttattaatacatttatatccaacatatggcacgtaaccgaatcttcctattcctttaacttctggaagttccaaactcagaaccaaatgattaagcgcagtaatgtactgatccctaatctcgaagctagcaatagcctgattgtcgggaccgtcgtttgtcataactccggatagagaaatatagtgcggcatatacaaagttggaatttgactatcgaccgcgaagacattagaccgtttaatagagtcatccccaccgatcaaagaattaatgatagtattattcattttctatttaaaatggaaaaagcttacaataaactccgtagagaaatatctataatttgtgagttttccttaaagtaacaacttccgtaaactccgtctttatctcttagtaagtttattgtatttatgaccttttccttatcttcatagaatactaaaggcaacaaagaaatttttggttcttctctaagagctacgtgagacttaaccatagaagccaacgaatccctacatattttagaacagaaataccccacttcaccaccattgtatgtctcaatactaataggtctaaaaaccaaatcttgattacaaaaccaacacttatcaattacactatttgtcttaatagacacatctgccatagatttataatactttggtagtatacaagcgagtgcttcttctttagcgggcttaaagactgctttaggtgccgaaataaccacatctggaaggcttactcgcttagccatttaattacggaactatttttttatacgtctaatgagcaagtagaaaacctctcgtctacaaaaacatactcgtgtccataatcctctaccatagtaacacgttttttagatcgcatatgcgctaaaaaattttcccatactaattggttactattatttttcgtataattcttgaccgtttgaggttttagatttttagttacggaagtgatatcgaatattttatccaaaaagaatgagtaattaattgtcttagaaggagtgttttcttggcaaaagaataccaagtgcttaaatatttctactacttcattaatcttttctgtactcagattcagtttctcatcttttacttgattgattatttcaaagactaacttataatcctttttatttattctctcgttagctttaagaaaaccagatacaaaatttgcatctacatcatccgtggatatttgatttttttccatgatatccaagagttccgagataatttctccagaacattgatgagacaataatctccgcaatacatttctcaaatgaataagtttattagacacgtggaagttcgactttttttgtatctttgtacatttttgaaatacagactcgcaaaaaatacaatattcatatccttgttcagatactataccgttgtgtctacaaccgctacataatcgtagattcatgttaacactctacgtatctcgtcgtccaatattttatataaaaacattttatttctagacgttgccagaaaatcctgtaatacttttagtttttggggttgtgaataaagtatcgccctaatattgttacagtcttccgccaatatagtagttaaattatccgcacatgcagaagaacaccgcttaggtggattcagtacaatgttatatttttcgtaccaactcatttaaatatcataatctaaaatagttctgtaatatgcctagcgctaatatattgatcataatcctgtgcataaattaagatacaacaatgtcttgaaatcatcgacatggcttcttccatagttagaagatcgtcgtcaaagttagcaacgtgattcatcaacatttgctgttttgaggcagcaaatactgaaccatcgccattcaaccattcataaaaaccatcgtctgaatccattgataatttcttgtactggtttttgagagctctcatcaatctagcatttctagctcccggattgaaaacagaaagaggatcgtacatccagggtccattttctgtaaatagaatcgtataatgtcccttcaagaagatatcagacgatccacaatcaaagaattggtctccgagtttataacagactgcggactttaacctatacatgataccgtttagcatgatttctggcgatacgtcaattggagtatcatctattagagatctaaagccggtgtaacattctccaccaaacatattcttattctggcgtcgttctacataaaacatcattgctccattaacgataacaggggaatgaacagcactacccatcacattagttcccaatggatcaatgtgtgtaactccagaacatcttccatagcctatgttaggaggagcgaacaccactcttccactattgccatcgaatgccatagaataaatatccttggaattgatagaaatcggactgtcggatgttgtgatcatcttcataggattaacaacgatgtatggcgccgcctgaagtttcatatcgtaactgatgccgttcataggtctagccacagaaaccaacgtaggtctaaatccaactatagacaaaatagaagctaatatctgttcctcatcggtcataacttgagagcatccagtatgaataatcttcattagatggggatctaccgcatcatcatcgttacaataaaaaattcccattctaatgttcataattgcttttctaatcatggtatgcatgtttgctctctgaatctctgtggaaattagatctgatacacctgtaatcactatcggattatcctccgtaagacgattaaccaacaacatataattataagactttactcttctaaattcataaagttgctggattagactatatgtgtctccatgtacatacgcgttctcgagcgctggaagtttaataccgaatagtgccatcagaataggatgaatgtagtaattagtttctggttttctataaataaaagacaaatcttgtgaactagacatatcggtaaaatgcatggattggaatcgtgtagtcgacagaagaatatgatgattagatggagagtatattttatctaactctttgagttggtcaccgattctaggactagctcgagaatgaataagtactaaaggatgagtacatttcacagaaacactagcattgttcaacgtgctctttacatgggtaaggagttgaaatagctcgtttctatttgttctgacaatatttagtttattcataatgttaagcatatcctgaatagtaaagttagatgtgtcatacttgttagtagttagatatttagcaattgcattcccatcatttctcaatctcgtactccaatcatgcgtggatgctacttcgtcgatggaaaccatacaatcctttttgataggctgttgagattgattatttcctgcacgtttaggtttggtacgttgatttctagctcctgcggatataaagtcatcgtctacaatctgggataatgaattgcatacactacaagacaaagatttatcagaagtgtgtatatgatcttcatctaccaaagaaagagtttgattaatataactagattttagtcctgcgttagatgttaaaaacccatcactattgagcacggcttccattatttatattcgtagtttttactcgaaagcgtgattttaatatccaatcttattacttttggaatcgttcaaaacctttgactagttgtaaaatttgatctattgccctacgtgtatattcccttgcatcatatacattcgttaccagatcagttgtttcggcttgaagttgatgcatatctttttcaacactcgacatgagatccttaagggacatatcgtctagattttgttgtgatattgctcctggatttggattttgttgtgctgttgtacatactgtaccaccagtaggtgtaggagtacatacagtggccacaataggaggttgaggaggtgtaaccgttggagtagtacaagaaatacttccatccgattgttgtgtacatgtggttgttggcaacgtctgagaaggttgggtagatggcggtgttgtcgtcttttgatctttattaaatttagagataatatcctgaacagcattgctcggcgtcaacgctggaaggagtgaattcgactgtgtatcggtatctgacgacaaccaatcaaaaagattagacatatccgatgatgtattagtttgttgtcgtggttttggtgtaggagcagtactactaggtagaagaatagcagacggtgtagatgtcggaaccggctgtggagttatatgaattgttggttgtagcggttggataggccgtctattggcgaccatcatattatctctagctagttgttctcgcaactgtctttgataatacgactcttgagactttagtcctatttcaatcgcttcatcctttttcgtatccggatccttttcttcagaataatagattgatgactttggtgtagaggcttctaccagcccctgtgagaacttgttaaagaagtccatttaaggctttaaaattgaattgcgattataagattaaatggcagacacagacgatattatcgactatgaatccgatgatctcaccgaatacgaggatgatgacgaagaggaagaagatggagagtcactagaaactagtgatatagatcccaaatcttcttataagattgtagaatccgcatccactcatatagaagatgcgcattccaatcttaaacatatgggaaatcatatatctgctcttaaacgacgctatactagacgtataagtctatttgaaatagcgggtataatagcagaaagctataacttgcttcaacgaggaagattacctctagtttcagaattttctgacgaaacgatgaagcaaaatatgctacatgtaattatacaagagatagaggagggttcttgtcctatagtcatcgaaaagaacggagaattgttgtcagtaaacgattttgacaaagatggtctaaaattccatctagactatattatcaaaatttggaaacttcaaaaacgatattagaatttatacgaatatcgttctctaaatgtaacaatcaagtctcgcatgttcagcagtttattgtcgtactttatatcgtgttcattaacgatattttgcaaaatagtaatgattctatcttccttcgatagatattcttcagagattattgtcttatattctttcttgttatccgatatgaatttgataagactttgaacattattaattcccgtctgtttaattttttctacggatattttagttttggcagattctatcgtatctgttaatagacacccaacatcaacattcgacgtcaattgtctataaatcaacgtataaattttagaaataacattagcaaattgttgggcgttgatgtcgttattctgaaacagtatgattttaggtagcattttcttaacaaagagaacgtatttattattactcagttgaacagatgatatatccagattactaacacatctgattccgtataccaaactttcagaagaaatggtatacaattgtttgtattcattcaatgtctctttttcagaaattagtttagaatcgaatactgcaataattttcaagagatagttttcatcagataagattttatttagtgtagatatgataaaactattgttttgttggagaacttgatacgccgcattctctgtagtcgacgctctcaaatgggaaacaatctccattatttttttggagtcggatacgatatcttcggtatcttgacgcaatctagtatacatagagttaagagaaattatagtttgtacattgagcaacatgtctctaaatgcgactacaaatttttccttttccacatcatctagtttattatataccgatttcacaacagcaccagatttaaggaaccagaatgaaaaactctgataactacaatatttcatcatagttacgattttatcatcttctatagttggtgtgatagcgcatacctttttctccaagactggaaccaatgtcataaaaatgtttaaatcaaaatccatatcaacatctgatgcgctaagaccagtctcgcgctcaagattatctttactaatggtgacgaactcatcgtatagaactctaagtttgtccattatttatttacagatttagttgtttaatttatttgtgctcttccagagttgggatagtatttttctaacgtcggtattatattattaggatctacgttcatatgtatcataatattaatcatccaggttttgataaatctatctttagcttctgaaataacgtatttaaacaaaggagaaaaatatttagctacagcatcagacgcaataacattttttgtaaatgtaacgtatttagacgacagatcttcgttaaaaagttttccatctatgtagaatccatctgttgttaacaccattcccgcgtcagattgaataggagtttgaatagtttgttttggaaatagatccttcaataacttatagttgggtgggaaaaaatcgattttatcactagactctttcttttttactatcattacctcatgaactatttcttgaatgagtatatgtattttctttcctatatcagacgcgttcattggaaaatataccatgtcgttaactataagaatatttttatcctcgtttacaaactgaataatatcagatgtagttcgtaaacgaactatatcatcaccggcacaacatctaactatatgatatccactagtttcctttagccgtttattatcttgttccatattagcagtcattccatcatttaagaaggtgtcaaagataatagggagaaatgacattttggattctgttacgactttaccaaaattaaggatatacggacttattatctttttttcaacgtcgatttgatgaacacacgatgaaaatgtacttcgatgagattgatcatgaagaaaacaacaagggatacaatatttccgcatatcatgaaatatattaagaaatcccactttattatatttccccaaaggatccatgcacgtaaacattataccgttatcattaataaatacttctttctcatcggatctgtaaaagttgttactgatttttttcattccaggatctagataattaataatgatgggttttctattcttattctttgtattttgacatatcctagaccagtaaacagtttccactttggtaaaatcagcagacttttgaacgctattaaacatggcattaatggcaataactaaaaatgtaaaatatttttctatgttaggaatatggtttttcactttaatagatatatgttttttggccaaaatgatagatatttttttatccgaggatagtaaaatattattagtcgccgtctctataaaaatgaagctagtctcgatatccaattttattctagaattgataggagtcgccaaatgtaccttatacgttatatctcccttaatgcgttccatttgtgtgtctatatcggatacaagatcagtaaatagtttcacattattaatcatcacagtatcgccgtcgctagataatgctaatgtgccatccaagtcccaaatggagagatttaactgttcatcgtttagaataaaatgattaccggtcatattaataaagtgttcatcgtatctagataacgccgacttataattaatgtccaagtcttgaactcgctgaataatcttttttaacccagttagttttagattggtacgaaatatattgttaaactttgattctacagtaatgtccaaatcgagtcgtggaaatacttccatcaacattgtttcaaacttgataatattattatctacatcttcatacgatccaaattccggaatagatgtatcacatgctcttgccacccagataaccaaaaagtcacacgctccaggatatacattgtataaaaagctatcgtttttaagtagggtttttttctgcgtatatacgaagggattaaaaatagtattatcaacgtaactatattccaaattattcttatgagaatagataataatatcgtccttaatatctaacaaatttcctaaatatccctttaattgagtcattcgaagcgtcaataaaatatgtctcttaactatttccggccgttgtatatttaaatgacttcgtaagaaataatatatgggcgacttctcatctatgtaatcatatggagtgagatatagggctcgttctacctcctgccccttacccacctgtaataccaattgcggactcactgtatatcgcatatttatatcgtggggtaaagtgaaaatctactaccgatgatgtaagtcttacaatgttcgaaccagtaccagatcttaatttggaggcctccgtagaactaggggaggtaaatatagatcaaacaacacctatgataaaggagaatagcggttttatatcccgtagtagacgtctattcgcccatagatctaaggatgatgagagaaaactagcactacgattctttttacaaagactttattttttagatcatagagagattcattatttgttcagatgcgttgacgctgtaaaagacgtcactattaccaaaaaaaataacattatcgtggcgccttatatagcacttttaactatcgcatcaaaaggatgcaaacttacagaaacaatgattgaagcattctttccagaactatataatgaacatagtaagaaattcaaattcaactctcaagtatccatcatccaagaaaaactcggataccagtctggaaactatcacatttatgattttgaaccgtattactctacagtagctctggctattcgagatgaacattcatctggcatttttaatatccgtcaagagagttatctggtaagttcattatctgaaataacatatagattttatctaattaatctaaaatctgatcttgttcaatggagtgctagtacgggcgctgtaattaatcaaatggtaaatactgtattgattacagtgtatgaaaagttacaactggtcatagaaaatgattcacaatctacatgttcattggctgtggaatcagaacttccaataaaattacttaaagatagaaatgaattatttacaaaattcatcaacgagttaaaaaagaccagttcattcaagataagcaaacgcgataaggatacgttactaaaatattttacttaggagttagaatttatagacgactcatttcgtgtatcattgttactattactattactattactattactattactatcattattagtgttggtattattagtattcttcttgtcatcttgttcagaaatatacagcaatgctatacctaatactaaatacattatcatgcttgcaatggctctaacaacgacgaaccaaaatgaatttggtcgtagcttttgttcacaaaaatacataaagaaatgtctacataaatctatggcgccattggctacttgaaatagcgccagtcctcctacagattttaatatagctgtataacatgacatttattcatcatcaaaagagacagagtcaccatctgccatatttagattttttttcatgtgttcaaagtatcctctactcatttcattataatagtttatcatacttagaattttaggacggatcaatgagtaagacttgactagatcgtcagtagtaatttgtacatcgtctattctgcatccgcttcgtcgaataatgtatagcatcgctttgagattctccatagctatcaagtctttatacaatgacatggaaatatctgtgaatactttatacttctccaacatcgatgccttaacatcatcgcctactttagcattgaaaatacgttctattgtgtagatggatgtggcaagatttttaaacaacaatgccatcttacacgatgattgcctcaagtctccgatcgtttgtttagaacgattagctacagagtccaatgcttggctgactaacatattattatctttagaaattgtattcttcaatgaggcgtttatcatatctgtgatttcgttagtcatattacagtctgactgggttgtaatgttatccaacatatcacctatggatacggtacacgtaccagcatttgtaataatcctatctaagatgttgtatggcattgcgcagaaaatatcttctcctgtaatatctccactctcgataaatctactcagattattcttaaatgccttattctctggagaaaagatatcagtgtccatcatttcattaatagtatacgcagaaaagataccacgagtatcaattctatccaagatacttatcggttccgagtcacagataatggtttcctctccttcgggagatcctgcatagaaatatctaggacaatagtttctatactgtctgtaactctgataatctctaaagtcactaactgataccatgaaattgagaagatcaaacgctgaagtaatcaatttttctgcctcgtttttactacaactagttttcatcaatgtagtgacgatgtattgtttagttactcttggtctaatactgatgatagagatattattgcttcccataatggatcttctagtagtcaccttaaagcccattgatgcgaatagcagatagataaagtcttggtatgactcctttctaatatagtacggactacctttgtcacccaactttatacccacataagccataacaacctctttaatagccgtttcatgaggtttatcagccatgagcctgagtagttggaagaatctcatgaatcccgtctcggacagtcctatatgcatgatagatttatctttcctgggaaactctcgtatagtcatagatgaaatactcttcaaagtttctgaaataagattagtaacagtcttacctccgactactctgggtaacaaacatactctaataggtgttttctctgcggagataatatcagaaaggatagagcaataagtagtattattgtgattataaagaccgaatacataacaggtagaatttataaacatcatgtcctgaaggtttttagacttgtattcctcgtaatccataccgtcccaaaacatggatttggtaactttgatagccgtagatctttgttccttcgccaacatactaaggaaagtaataaagaatttgttgtttctatttatgtccacaaattgcacgtttggaagtgcaactgttacgttcactgcagcattttgaggatctcgagtatgaagtacgatgttattgtttactggtatatctggaaagatttctaccagtctaggaataagagattgatatctcatagaaatagaaaagtttataatctcatcatcaaagatcattctgttaccattgtaataaattggtactctatcataatcatcgacaaagtactgttcatacatgatgagatgtttatatgttggcatagtagtgagatcgacgtttggtaatggcaatgtattaagattaactccataatgtctagcagcatctgcgatgttataagtgttgtcaaatcggggtcgatcttgtgctgttatatattgtctaacacctataagattatcaaaatcttgtctgcttaatacaccgttaacaatttttgccttgaattcttttattggtgcattaataacatccttatagaggatgttaaacaaataagtattatcgaagttaagatctgggtatttcttttctgctagaacatccattgagtcggagccatctggtttaatataaccaccgataaatctagctctgtattctgtatccgtcaatctaatattaagaaggtgttgagtgaaaggtggaagatcgtaaaagttgtgagtattaataatagggttagtttccgaactaatgttaattggatgattaataatatcgatatttccagcgttaagtgtgacattaaacagtcttaattcacttgacgtggtatcaattaaataattaatgcccaatttggatatagcagcttgaagctcatcttgtttagttacggatcctaatgagttattaagcaatacatcgaacggatgaacgaaggttgttttgagttggtcacatactttgtaatctagacatagatgcggaagaacggtagaaactatacgaaatagatattcagagtcctctaattgatcaagagtaactattgacttaataggcatcatttatttagtattaaatgacgaccgtaccagtgacggatatacaaaacgacttaattacagagttttcagaagataattatccatctaacaaaaattatgaaataactcttcgtcaaatgtctattctaactcacgttaacaacgtggtagatagagaacataatgccgccgtagtgtcatctccagaggaaatatcctcacaaattaatgaagatctatttccagatgatgattctccggccactattatcgaaagagtacaacctcatactactattattgacgatactccacctcctacttttcgtagagagttattgatatcggaacaacgtcaacaacgagaaaaaagatttaatattacagtatcgaaaaatgctgaagcaataatggaatctagatctatgataacttctatcccaacacaaacaccatccttgggagtagtttatgataaagataaaagaattcagatgctagaggatgaagtggttaatcttagaaatcaacgatctaatacaaaatcatctgataatttggataattttaccagaatactatttggtaagactccgtataaatcaacagaagttaataagcgtatagccatcgttaattatgcaaatttgaacgggtctcccttatcagtcgaggacttggatgtttgttcggaggatgaaatagatagaatctataaaacaattaaacaatatcacgaaagtagaaaacgaaaaattatcgtcactaacgtgattattattgtcataaacattatcgagcaggcattgctaaaactcggatttgaagaaatcaaaggactgagtaccgatatcacttcagaaattatcgatgtggagatcggagatgactgcgatgctgtagcatcaaaactaggaatcggtaacagtccggttcttaatattgtattgtttatactcaagatattcgttaaacgaattaaaattatttaatttaatacattcccatatccagacaacaatcgtctggattaacttgttcctgtcgtctcataccggacgacatattaatctttttattagtatgcatctttttagatgatttctttttcccagcattaactgattcgatacctagaagatcgtgattgatctctccgaccattccacgaacttctaattgaccgtctctaacggtaccataaactattttaccagcattagtaacagcttggacaatctgaccatccattgcgttgaatgatgtagttgctgttgttctacgtctaggagcaccagaagtatttttggagcccttggatgttgatgtagaagaagacgaggattttgattttggtttacatgtaatacattttgaactctttgattttgtatcacatgcgccggcagtcacatctgtttgagaattaagattattgttgcctcctttgacggctgcatctccaccgatttgcgctagtagatttttaagctgtggtgtaatcttattaactgtttcgatataatcatcgtaactgcttctaacggttaaattttttttatccgccatttagaagctaaaaatatttttatttatgcagaagatttaactagattatacaatgaactaatatgatccttttctagattatttacaaacttggtatttcttggttctggaggaggtggattaggatccggattttgtgggctcttgatcttattatacagcgcgtataggatggcgacagtaactgctacacaaatgccgatcaaaagaagaataccaatcatttattgacaataacttcactatgatcaagtatgtaatatatatcatcttttcactaaataagtagtaataacgattcaacaatgtcgagatatatggacgataataatttagttcacggaaatatcgctatgattggtgtgaatgactccgctaactctgtggggtgcgcagtgctttccccacatagaataaattagcattccgactgtgataataataccaagtataaacgccataatactcaatactttccatgtacgagtgggactggtagacttactaaagtcaataaaggcgaagatacacgaaagaatcaaaagaatgattccagcgattagcacgccggaaaaataatttccaatcataagcatcatgtccatttaactaataaaaattttaaattgccgaatgaacaaagtggaatataaaccatataaaaacaatagtttgtactgcaaaaataatatctatttttgttttcgaagatatggtaaaattaaatagtagtacacaacatgttataactaacagtagcaacggctcgtaattacttatcatttactagacgaaaaggtggtgggatattttcttgctcaaataatacgaatatatcacccatccattttatgcgatgtttatatactctaatctttaataaatctatagacgacgggtttaccaacaatatagattttatcgattcatctaatttaaacccttccttaaacgtgaatgatttattatctggcataacgatgaccctacctgatgaatcggataatgtattgggccatgtagaataaattatcaacgaattatcgtctacgaacatttatatcatttgttttaattttaggacgcgaataaatagatataaaatagaaaataacagatattacaaccagtgttatggccgcgcccaaccaggtaggcagttttattttatcttttactacaggttctcctggatgtacgtcaccaactgcagacgtagttctagtacaattagacataagttccgcttgggaattttttaacgctaaagagttaacgttaaccgtacacccaacgtatttacatctagttctttgaacatcttgattataatataaccattttctatctctagattcgtcagtgcactcatgtaaccaacataccctaggtcccaaatatttatctccggaatttgattttggataattcgcacaccaacaatttctatttcctttatgatcgttacaaaagacatataatgctgtatccccaaaagtaaaataatcaggacgaacaattctaataaactcagaacaatatctcgcatccatatgtttggaacaaatatcagaataagtagacatagccggttttcgttttgctcgtaaccattctaaacaattggggtttccaggatcgtttctacaaaatccagtcatgaaatcgtcacaatgttcggtcttgtaattattattaaatatttttggacagtgtttggtatttgtcttagaacaacattttgccacgctatcgctatcgcccaggagataatccttttttataaaatgacatcgttgcccggatgctatataatcagtagcatgttttaaatccttaatatattcaggagttacctcgttctgataatagattaatgatccaggacgaaatttgaaagaactacatggttctccacgaattaatacatattgtttagcaaattcaggaactataaaactactgcaatgatctatcgacataccatctatcaaacaaaatttgggtttaatttctcctggagacgtttcataataatacatataactttcttcggcaaacctaacagctctattatattcaggataattaaaacctaataccatatatttgtctcgtatatctgctattcctgtctctattttgatgctattaagagtaacagctgcccccattcttaataatcgtcagtatttaaactgttaaatgttggtatatcaacatctatcttatttcccgcagtataaggtttgttacatgtatgatgttcaggaatggttatatttattcttttatagtcctgtctttcgatgttcatcacatatgcaaagaacagaataaacaaaataatgtaagaaataatattaaatatctgtgaattcgtaaatacattgattgccataataattacagcagctacaatacacacaatagacattcccacagtgttgccattacctccacgatacatttgagttactaagcaataggtaataactaagctagtaagaggcaatagaaaagatgagataaatatcatcaatatagagattagaggagggctatatagagccaagacgaacaaaatcaaaccgagtaacgttctaacatcattatttttgaagattcccaaataatcattcattcctcgataatcgttttgtatcatacctccatctgtaggcataaacgattgttgctgttcctctgtaaataaatctttatcaagcactccagcacccgcagagaagtcgtcaagcatattgtaatatcttaaataactcatttatatattaaaaaatgtcactattaaagatggagtataatctttatgccgaactaaaaaaaatgacttgtggtcagcccataagtctttttaatgaagacggtgatttcgtagaagttgaaccaggatcatcctttaagtttctaatacctaagggattttactcctctccttccgtaaagacgagtctagtattcgagacattaacaacgaccgataataaaattactagtatcaatccaataaatgcgccaaagttatatcctcttcaacgcaaagtcgtatctgaagtagtttctaatatgaggaaaatgatcgaattaaaacgtcctctatacatcactcttcacttggcgtgtggatttggtaagactattaccacgtgttatcttatggccacgcacggcagaaaaaccatcatttgcgtacccaataaaatgttaatacatcaatggaagacattggtagaggcagtcggattggaacataagatatctatagatggtgttagtagtctattaaaggaactaaagactcaaagtccggatgtattaatcgtagtcagtagacatctgacaaacgatgcattttgtaaatatatcaataagcattatgatttgttcatcttggatgaatcacatacgtataatctgatgaacaatacagcagttacaagatttttagcgtattatcctccgatgatgtgttattttttaactgctacacctagaccagctaacagaatttattgtaacagtattattaatattgccaagttatccgatctaaaaaaaactatctatgtagtggatagtttttttgatccatattccacagataatattagacatatgataaaacgactagatggaccatctaataaatatcatatatataccgagaagttattatctgtagacgagcctagaaatcaacttattcttgataccctggtagaagaattcaaatcgggaactattaatcgaattttagttattaccaaactacgtgaacatatggtaatgttctacaaacgattattagatcttttcggaccagaggttgtatttataggagacgcccaaaatagacgtactccagatatggtcaaatcaatcaaggaactaaatagatttatatttgtatccaccttattttattccggtactggtttagatattcctagtttggattctttgttcatttgctcagcagtaatcaacaatatgcaaatagagcaattactagggagggtatgtcgagaaacagaactattagataggacggtatatgtatttcctagcacatccattaaagaaataaagtacatgataggaaattttgtacaacgaattattagtctatctgtagataaactaggatttaaacaagaaagttatcggaaacatcaagaatccgatcccacttctacatgtacaacatcctccagagaagaacgtgtattaaatagaatatttaactcgcaaaatcgttaagaagtttaagcgacgatccgcatgctgcacaggccagtgtattacccctcatagtattaatataatccaatgatacttttgtgatatcggaaatcttaaccaatttagactgacagacagaacacgtcatgcaatcatcatcgtcatcgataactgtagtcttgggcttctttttgcggctcttcattccggaacgcgcgttggtactatccatttaggtagtaaaaaataagtcagaatatgccctatagcacgatcgtacaaaacctggtagtatatcgtctctatctttatcacaatatagtgtatcgacatctttattattattgacctcgtttatcttggaacatggaatgggaacatttttgttatcgacagccacctttgccttaattccagatgttgtaaaattataactaaacattctatcatcgacacaaatgaaattcttgtttagacgtttgtagtttacgtatgcggctcgttctcgtctcattttttcagatattgcaggtactataatattaaaaataagaatgaaataacataggattaaaaataaagttatcatgacttctagtgctgatttaactaacttaaaagaattacttagtctgtacaaaagtttgagattttcagattctgcggctatagagaagtataattctttggtagaatggggaacatctacttactggaaaataggcgtacaaaaggtagctaatgtcgagacgtccatatctgattattatgatgaggtaaaaaataaaccgtttaatattgatccggggtattatattttcttaccggtatattttggaagcgtctttatttattcgaagggtaaaaatatggtagaactaggatctggaaactcttttcaaataccagatgatatgcgaagtgcgtgtaacaaagtattagacagcgataacggaatagactttctgagatttgttttgttaaacaatagatggataatggaagatgctatatcaaaatatcagtctccagttaatatatttaaactagcgagtgagtacggattaaacatacccaaatatttagaaattgaaatagaggaagacacattatttgacgacgaattatactctattatagaacgatctttcgatgataaatttccaaaaatatctatatcgtatattaagttgggagaacttaagcggcaagttgtagactttttcaaattctcattcgtgtatattgagtccatcaaggtagatcgtataggagataatatttttattcctagcgttataacaaaatcaggaaaaaagatattagtaaaagatgtagaccatttaatacgatccaaggttagagaacatacatttgtaaaagtaaaaaagaaaaacacattttccattttatacgactatgatgggaacggaacagaaactagaggagaagtaataaaacgaattatagacactataggacgagactattatgttaacggaaagtatttctctaagattggtagtgccggcttaaagcaattgactaataaattagatattaatgagtgtgcaaccgtcgatgatttagttgatgagattaataaatccggaactgtaaaacgaaaaataaaaaaccaatcagtatttgatttaagcagagaatgtttgggatatccagaagcggattttataacgttagttaataacatgcggttcaaaatagaaaattgtaaggttgtaaatttcaatattgaaaatactaattgtttaaataacccgagtattgaaactatatatggaaactttaaccagttcgtctcaatctttaataccgttaccgatgtcaaaaaaagattattcgagtgaaataatatgcgcctttgatataggtgcaaaaaatcctgctagaactgttttagaagtcaaggataactccgttagggtattggatatatcaaaattagactggagttctgattgggaaaggcgcatagctaaagatttgtcacaatatgaatacactacagttcttctagaacgtcagcctagaaggtcaccgtacgtcaaatttatctattttattaaaggctttttatatcatacatcggctaccaaagttatttgcgtctcgcctgtcatgtctggtaattcatatagagatcgaaaaaagagatctgttgaagcatttcttgattggatggacacatttggattgcgagactccgttccggatagacgcaaattagacgatgtagcggatagtttcaatttggctatgagatacgtattagataaatggaatactaattatacaccttataatagatgtaaatctagaaattacataaaaaaaatgtaataacgttagtaacgccattatggataatctatttacctttctacatgaaatagaagatagatatgccagaactatttttaactttcatctaataagttgcgatgaaataggagatatatatggtcttatgaaagaacgcatttcctcagaggatatgtttgataatatagtatataataaagatatacatcccgccattaagaaactagtttattgcgacatccaacttactaaacacattattaatcagaatacgtatccggtatttaacgattcttcacaagtgaaatgttgtcattatttcgatataaactcagataatagcaatattagctctcgtacagtagagatatttgagagggaaaagtcatctcttgtatcatatattaaaactaccaataagaagagaaaggtcaattatggggaaataaagaaaactgtacatggaggcactaatgcaaattacttttccggtaaaaaatctgatgagtatttgagcactacagttagatccaacattaatcaaccttggatcaaaaccatctctaagaggatgagagtcgatatcattaatcactctatagtaacgcgtggaaaaagctctatattacaaactatagaaattatttttactaatagaacatgtgtgaaaatattcaaggactctactatgcacattattctatccaaggacaaggatgaaaaggggtgtatacacatgattgataaattattctatgtctattataatttatttctgttgttcgaggatatcatccaaaacaaatactttaacgaagtagccaatattgtaaaccacgtactcacggttacggcattagatgagaaattattcctaattaagaaaatggctgaacacgatgtttatggagttagcaatttcaaaatagggatgtttaacctgacatttattaagtcgttggatcatacagttttcccctctctgttagatgaggatagcaaaataaagttttttaaggggaaaaagctcaatattgtagcattacgctctctggatgattgtataaattacgtgactaaatccgagaatatgatagaaatgatgaaggaaagatcgactattttaaatagcatagatatagaaacggaatcggtagatcgtctaaaagaattgcttctaaaatgaaaaaaaacactgattcagaaatggatcaacgactaggatataagtttttggtgcctgatcctaaagccggagttttttatagaccgttacatttccaatatgtatcgtattctaattttatattgcatcgattgcatgaaatcttgaccgtcaagcggccactcttatcgtttaagaataatacagaacgaattatgatagaaattagcaatgttaaagtgactcctccagattactcacctataatcgcgagtattaaaggtaagagttatgacgcattagcaacgttcactgtaaatatctttaaagaggtaatgaccaaagagggtatatccatcactaaaataagtagttatgagggaaaagattctcatttgataaaaattccgctactaataggatacgggaataaaaatccacttgatacagccaagtatcttgttcctaatgtcataggtggagtctttatcaataaacaatctgtcgaaaaagtaggaattaatctagtagaaaagattacaacatggccaaaatttagggttgttaagccaaactcattcactttctcgttttcctccgtatcccctcctaatgtattaccgacaagatatcgccattacaagatatctctggatatatcacaattggaagcatcgaatatatcatctacaaagacatttataacggtcaatattgttttgctgtctcaatatttatctagagtgagtctagaattcattagacgtagtttatcatacgatatgcctccagaagttgtgtatctagtaaacgcgataatagatagtgctaaacgaattactgaatctattactgactttaatattgatacatacattaatgacctggtggaagctgaacacattaaacaaaaatctcagttaacgattaacgagttcaaatatgaaatgctgcataactttttacctcatatgaactatacacccgatcaactaaagggattttatatgatatctttactaagaaagtttctctactgtatctaccacacttctagatatccagatagagattcgatggtttgtcatcgtatactaacatacggcaaatattttgagacgttggcacatgatgaattagagaattacataggcaacatcagaaacgacatcatgaacaatcacaagaacagaggcacttacgcggtaaacattcatgtactaacaactcccggacttaatcatgcattttctagtctattgagtggaaagttcaaaaagtcagacggtagttatcgaacacatcctcactattcatggatgcagaatatttctattcctagaagtgttggattttatcctgatcaagtaaagatttcaaagatgttttctgtcagaaaataccatccaagtcaatatctttacttttgttcatcagacgttccggaaagaggtcctcaggtaggtttagtatctcaattgtctgttctgagttccattacaaatatactaacgtctgagtatttggatttggaaaagaaaatttgtgagtatatcagatcatattataaagatgatataagttactttgaaacaggatttcctattactatagaaaatgctctagtcgcatctcttaatccaaatatgatatgtgattttgtaactgactttagacgtagaaaacggatgggattcttcggtaacttggaggtaggtattactttagttagggatcacatgaatgaaattcgcattaatattggagcaggaagattagtcagaccattcttggttgtggataacggagagctcatgatggatgtgtgtcaggagttagaaagcagattagacgacatgacattctctgacattcagaaagagtttccacatgtcatcgaaatggtagatatagaacaatttacttttagtaacgtatgtgaatcggttcaaaaatttagaatgatgtcaaaggatgaaagaaagcaatacgatttatgtgactttcctgccgaatttagagatggatatgtagcatcttcactagtgggaatcaatcacaattctggacccagagctattcttggatgtgctcaagctaaacaagctatctcttgtctgagttcggatatacgaaataaaatagacaatggaattcatttgatgtatccagagagaccaattgtcattagtaaggctttagaaacttcaaagattgcggccaattgcttcggacaacatgttactatagcattaatgtcgtacaaaggtatcaatcaagaggatggaattatcatcaaaaaacaatttattcagagaggcggtctcgatattgttacagccaagaaacatcaagtagaaattccattggaaaactttaataacaaagaaagagataggtctaacgcctattcaaaattagaaagtaatggattagttagactgaatgctttcttggaatccggagacgctatggcacgaaatatctcatcaagaactcttgaagatgattttgctagagataatcagattagcttcgatgtttccgagaaatataccgatatgtacaaatctcgcgttgaacgagtgcaagtagaacttactgacaaagttaaggtacgagtattaaccatgaaagaaagaagacccattctaggagacaaatttaccactagaacgagtcaaaagggaacagtcgcgtatatcgcggatgaaactgaacttccatacgacgaaaatggtatcacgccagatgtcattattaattctacatccatcttctctagaaaaactatatctatgttgatagaagttattttaacagcagcatattctgctaagccgtataacaataatggagaaaacagacctgtctgttttccgagtagtaacgaaacatcgatagatacatatatgcaattcgctaaacaatgttacgagcattcaaatccacaattgacagatgatgaattgtcggataaagtcttttgtgaaaagattctctacgatccagaaacggataaaccttatgcatccaaagtattttttggaccaatttattacttgcgtctgagacatttaactcaggataaggccaccgttagatgtagaggtaaaaagacgaagctcattagacaagcaaatgagggacgaaaacgtggaggtggtatcaagttcggagaaatggagagagactgtttaatagcacatggtgcagcaaatactattacagaagttttgaaagattcggaagaagactatcaagacgtatacatttgtgaaaactgtggagatatagcagcacaaattaaaggtattaatacatgtcttcgatgttcaaaacttaatctctctcctctattaacaaaaatagataccactcacgtatctaaagtatttctgactcaaatgaacgcaagaggtgtaaaagtcaaattagatttcgaaagaaggcctccttcgttttacaaacaattagataaagtagacctaaaaccatcttttcttaagtagatattggtagaagatatgcactaacatcatatgcttcttcctgtaattctccccatattggatcatgaggtggattattgataacatgtggaggaggttgaggtatagatggtacttgagatcctgatgatggatgttctggtagagtattatccattggatgagatgtgctatgtgatttatctgtcgatggatcttctggatgttgtgaaacttctagagtatccactggagatgtaacatgaggtttatctgttgacggagttggagattttggcattgtatcttcagaagtaacaacttcattatcatggacttttgtatctagagctagtacatcaacgccagaatctgtaatattgcatttggagaggtaacgatcgcgttctagttctcttttgtagaacttaactttttctttctccgcatctagctggtattccaacttcttcacattagaacgttctaattgcaactcgcgttcgcattgaactccgccacagtctttacgagcgatttcacgttccagatcgtgctcagccttcatgcgtctctccctctctctatcgaatttatcagaatagtctttctgaagacgatcgaattctacaaatttttccaataccttaatcgtttccatgcatctccgaagttctgcttcgagaaccgcgattctttttctctcgaaatcacagactgagtgacaatttccacttcctccattaccgcaatctctgagtttcctttctagatccgcgatttttatcaacatctcttctccgtgtctcttacaatcctctagtctacgatcgttgaaatatttttccaattccttttcaacctcaacaactttaacacgttgtctctcgagttctctcttgtagtagctatcatttttatctgattccctagcgcgtctgagatcttcgtgtaattgtgtcaactctcgacgtagacgcttaacctcagatctagcctcttcgtcaaagtacgtgcaatatccatgtgatccgttattatggcgtctacaatcggcgagatctcgtttcagtgattcaatctctttcttatacttgattatatcctcattagtaccgttgtgtgattcacagtactctagttgttgtttgagatctttaatacggttctttagcctatctatttcctcagaagatgatccattaccgttacgtctacactcattaagttgcttatccagatccatgattctatttctcagacgttccatctctttttttgtatcggcattatggtcattattacgtctgcaatcagttagctgcctttccagatccgtaattctagatttgagtctgttaatctctgtaatattgtttcctccattatccatgcaatcagacaacttgttctccaggtccttgatacgtgaacgtagtgcctctacttcctgtgtgttttcttgattcctcatgcattcattgagtttgttttctagatctctagtattccgtcgttcatcctctagttccctatgtgccacagagagattttgttgatatctagcgatttcggattccagactagtaactctattggtgtatgtcataatagttatattggccttatcgagatcctccttgtattggttgcattcggtgatgtctctacgaagtctagacagttcccgttcggcgtcacgacgtttgtcgatttcgactcggagatcttcatcacgttgctttagccacatacgactgagttcaagttctcgttgacatgatccatcaacctttccattcctaatagtatccagttccttttctagttctgcacgcatttcccgttccctatcaagagattctctcaattccttaatagtctttttatcaatttctgctaatgctgaacaattgttggatccaccacccatatcccttagttctttgatctcatttgttagttgttcgatcctttcatttttatatacagaatccctttccaaagtcctaattttaccgagtttatcactaagttctttattcatgtcattgagctttttcttggcttcttccaactctctcgtaaactcttctccaccatttccgcattcttcctcgcatttatctaaccattcagttagtttgttaatgacaagttgataatcagcaattgcaagcgccgaccgtacgatagtgatatcattatctgctgtattatatggcattggtttggcgttgtctggattatgacgtgtcgaatctccaccatttgaaggagattctccggagtcaatagattctacacctttagttcctatatccataccaccagacgtatgcgaatatttgtcatatatgtctacttccttatccatcaagtatctataatctggttctacttctgagtattcttttctaagagacacaacttcgggagtcaatagtagaactctatttctgtatctatcgatgctggaatcgatactcaagttaagaatagcaaacacatcatcttcatcatcggtatcttctgtaacaccatcatatgacatttcatgaagcctgacatactgataaatagaatcagatttagtattaaacagatccttatactttttagtaaagacatatgtgtattttagatctccagattttataatatgatcacatgccttaaatgtcagtgcttccattatatagtctggaacgctaataggtgtcgaaaaagatgctgggccatatgctatgttaataaatggctctgaatcactaattattagattatgattaatgttaaggaaaaggaaaaattcattatatagatacgcattagctttatatcttgtactaaacacactaaataatttattaatgtggtcaatatccagtaaaataattatggttgctggaacaccaacgaacatattaccacatccatacttactatgaatatcacatatcgtgttaaacaatcttgatagaagagatgttaattcgtcaggatcaatgagttgtaattcagcagcagcatatgtcataactgtaaaaagaacatactttcctgtggtgttaactgaagacaccagatcaacgccattattaaaaatagtgttatatgcatctttaataggttctccgttaacagttgaattctctagaattttgaaacacgttgttttcttatttgtgattagtgaattagtgatatcacgaagaatattacgaattacatttcttgtttttcttgagagaccggattcagaactcaactcatcgttccatagtttttctacctcagtggcgaaatctttggagtgcttggtacatttttcaataaggttcgtgacctccatttattataaaaaaattttattcaaaacttaactacaatcgggtaattataagatcgtagatctcccatgtggcggaatactaccatctatcgcatgtggatggacagtaggtaatggccatgggaacagtaatgattgtatatttatctttcttgctagtattactgcatattgtcccaatgtttcgatgtggtgttctaacctatcaactgccgctgtattacaacaatagtgtccgatggaattaagattatgatccaatgtgtttaatatatgattatcaagtcttatacgatccgcgtcttttttgacaggatcaggttcttctacaggaagaagtttcggcctcttatgatattcatgtctgggaaacggtggtctagggtgaggctccggtatcggagtgggttttggattataatcatcatcgtctatgacatcctcatcatcatcttcgacttcgatatttattttgctatcttgatgatgtcctgtatcagttgcattttcagcactcgactgaatattagcgcattcattgtctattattaccatatttctaaacccaaaatgtatgtgttgaacatcactactatcgtggatgagtcttatagcatgaattcgcttatcgttatcgggtttagcttctgtcaccttagcaattccttttttattaaactctacataatcataaccatttctattgtttgttctaatataaacgagtatagaatcattgctaaatttttcaatagtatcgaaaacagaatatcctaaaccatataatatatattcaggaacactcaaactaaatgtccaggattctcctaaatacgtaaactttaatagtgcgaaatcattcaaaaatctaccgcttatagatagatagtatatgaatgcgtatagtagtctacctatctctttattacgaaaaccggcattacgatcatatatgtcgtgatatacctgtgatccgtttacgttaaaccataaatacatgggtgatcatataaacatgaatttattcctaattctcagagatatagttaattgatcgtataatatttgcttacatgcatacttgatacgctcattaataagatttttatcattgctcgttatctcagaatcgtatatataaggagtaccatcgtgattcttaccagatattatacaaaatactatatataaaatatattgaccaatgttagtaatcatataaatgtttaacgttttaaattttgtattcaatgatccattatcatacgctagcatggtcttatgatattcattctttaaaatataatattgtgttagccattgcattggggctcctaatggagattttctattctcatccattttgggataggctttcataaagtccctaataacttcgtgaataatgtttctatgttttctactgatgcatgtatttgcttcgatttttttatcccatgtttcatctatcatagatttaaacgcagtaatgctcgcaacattaacatcgtgaaccgttggcacaattccgttccataaatttataatgttcgccatttatataactcattttttgaatatacttttaattaaacaaaagagttaagttcattcatatggacggcgtccagtctgtacatcaatctttttagccagagatatcatagccgctctcagagtttcagcgtgattttccaacctaaatagaacttcatcgttgcgtttacaacacttttcgatttgttcaaactttgttgttacattagtaatctttttttccaaattagttagccgttgtttgagagtttcctcattgtcgtctccatcggctttaacagttgcttcgtgtttatcctctggctttttagcagcctttgtagagaaaaattcagttgctggaattgcaagatcatcatctccggggaaaagagttccgtccatttaaagtacagattttagaaactgacactctgcgttatttatatttggtgcaacacatggattataaatatcgatgttaataacatcagaaaatgtaaagtctatacattgttgcatcgtgttaaattttctaatggatctagtattattgagtccaacttctgtctgaaatccaaatatagaagcggatacaaaaccgtttcctggataaaccacacatctccacttttgctttacatcagaaattgtgtcattgacatcttgaactctcctatctaatgctggtgtaccacctatagattttgaatattcgaatgctgcatgcgtagcattaaattccttaatattgccataattttcatatattgagtaaccctggataaaaagtaaacacactgcagccgtcgctaccacaataaaaaaaattgatagagagttcatttataatatattagaagctgacaaaatttttttacacgcatcagacaatgctttaataaatagttcaacatctacttttgtcatatcgaaccgatggtatgattctaacctagaattacatccgaaaaagttgactatgttcatagtcattaagtcattaacaaacaatattccagactctggattataagatgatactgtttcgtcacaatcacctaccttaatcatgtgattatgaatattggctattagagaaccttctaagaaatctataatatctttgaaacacgatttaaaatcaaaccacgaatatacttctacgaagaaagttagtttacccataggagagataactataaatggagatctagatacaaaatccggatctatgatagttttaatattattatattctctattaaatacctcaacatctaaaaatgttaattttgaaactatgtcttcgcttattaccgtacctgaactaaacgctataagctctattgtttgcgaactctttaaacgatattcttgaaatacatgtaacaaagtttcctttaactcggtcggtttatccaccatagttacagaatttgtatccttatctataatataataatcaaaatcgtataaagttatataattatcgcgttcagattgtgatcttttcaaatagactaaaaaccccatttctctagtaagtatcttatgtatatgtttgtaaaatatcttcatggtaggaatatgctctaccgcagttagccattcctcattgacagctgtagatgtattagacaaaactattccaatgtttaacaagggccattttacgagattattaaatccttgtttgataaatgtagccaatgagggttcgagttcaacgacgattgaattctcttcccgcggatactgcatgatgaactacgggatgttgttcgattgatttggaattctttttcgactttttgtttatattaaatattttaaagtttatagctgatagcaattcatgtactacggataatgtagatgagtattgtacatcgatatctttattattagataaatttatcaataaatgtgagaagtttgcctcgttaaggtcttccatttaaatattatataaacatttgtgtttgcatcttattcgtcttttgtggaatagtttttaactagtaaagctgtaattacatactttgtccgtaaaacataaatataaacaccagctcttatcaaccgttccaaaaagtcgacggcggacatttttaacatggaatctattttaaatacgcttagatttctagaaaaaacatcattttataattgtgacaatttaataactactgaaaagataaagattaaacataagggaatggcatttgtattttataagccaaagcattctaccgttgttaaatacttgtctggaggaggtatatatcatgatgaattggttgtattggggaaggtaacaattaatgatctaaagatgatgctattttacatggatttatcatatcatggagtaacacgtagcggagcaatttacaaattgggatcatccatagatagactttctctaaataggactattgttacaaaagttaataataattataattatgatacattttttgacgacgatgattgatcgctattgcacaattttgtttttttactttctaatatagtgtttaggttctttttcatatgtgaatattgatttactaaaatatctatgtttaacttttgttctataacgtccttatcagcggtatcggtacatatacgtaattcaccttcacaaaatacggagtcttcgataataatagccaatctattattggatctagccgtctgtatcatattcaacatatttaatatatcctttcgtttcccctttacaggcattgatcgtagcatattttccgcgtctgagatggaaatgttaaaactacaaaaatgcgtaatgttagcccgtcccaatattggtacgtgtctataagtttggcatagtagaataatagacgtgttcaaatgccttccaaagtttaagaattctattagagtattgcattttgatagtttatcacctacatcatcaaaaataagtaaaaagtgtgctgattttttatgattttgtgcgacagcaatacatttttctatgttacttttagttcgtatcagattatattctagagcttcctgactactaacgaaattaatatgatttggccaaatgtatccatcataatctggattataaacgggtgtaaacaagaatatatgtttatattttttaactagtgtagaaaacagagatagtaaatagatagtttttccagatccagatcctcccgttaaaaccattctaaacggcatttttaataaattttctcttgaaaactgtttttcttgaaaacaattcataattatatttacagttactaaattaatttgataataaatcaaaatatggaaaactaaggtcgttagtagggaggcgaacaaagaaggaatatcgtgatataaataatatttattatcatgatgacgccagaaaacgacgaagagcagacatctgtgttctccgctactgtttacggagacaaaattcagggaaaaaataaacgcaaacgcgcgattggtctatgtattagaatatctatggttatttcactactatctatgattaccatgtccgcgtttctcatagtgcgcctaaatcaatgcatgtctgctaacgaggttgctattactgactccgctgttgacgttgctgctacatcatctactcatagaaaggttgcgtctagcactacacaatatgatcgcaaagaaagctgtaatggtttatattaccagggttcttgttatatactacattcagactataagtcatttgaggatgctaaagcaaactgcactgtggaatcattaatactacccaataaatccgatgtcttggctacctggctagctgaatatgttgaggatacatggggatctgacggcaatccaattacaaaaactacatccgagtatcaagattctgatgtatcacgagaagttagaaagtatttttgtgttaaaataatgaactaatatttatttttgtacataaataaatgaaatcgcttaatagacaaactgtaagtaggtttaagaagttgtcggtgccggccgccataatgatgatactctcaaccattattagcggcataggaacatttctgcattacaaagaagaactgatgcctagtgcttgcgccaatggatggatacaatatgataaacattgttatctggataccaacattaaaatgtccacagataatgcagtttatcagtgtcgtaaattacgagctagattgcctagacctgatactagacatctgagagtattgtttagtattttttataaagagtattgggtaagtttaaaaaagaccaataataaatggttagatatgaataataataaagatgtagatattagtaaattaacaaattttaaacaactaaacggtactacggattctgaagcgtgttatatatacaagtctggaaaactgtctaaaacagtatgtaaaagtactcaatctgtactatgtgttaaaagattctacaagtaacgacaaaaatgaaataataataagtccttaacgaacgtcgccatggacgccgcgtttgttattactccaatgggtgtgttgactataacagatacattatatgaggatctcgatatctcaataatagactttataggaccatatattataggtaacataaaaactgtccaaatagatgtatgggatataaaatattccgacatgcaaaaatgctactttagctataagggtaaaatagttcctcaggattctaatgatttggctagattcaacatttatagcatttgtgcagcatacagatcaaaaaataccatcatcatagcatgcgactatgatatcatgttagatatagaaggtaaacatcagccattttatctattcccatctattgatgtttttaacgctacaatcatagaagcgtataatctgtatacagctggagattatcatctgatcatcaatccttcagatgatctgaaaatgaaattgttgtttaattcttcattctgcatatcagacggcaatggatggctcataattgatgggaaatgcaatagtaattttttatcataaaagttgtaaagtaaattaataaaacaacaaatattgaactagtagtacgtatattgagcaatcagaaatgatgctggtaccacttatcacggtgaccgtagttgcgggaacaatattagtatgttatatattatatatttgtaggaaaaagatatgtactgtctataatgacaacaaaattatcatgacaaaattaaaaaagataaagaattctaattccagcaaatctagtaaatcaactgatagcgaatcagactgggatgatcactgtagtgccatggaacaaaataatgacgtagataatatttctaggaatgagatattggatgatgatagcttcgctggtagtttaatatgggataacgaatcccatgtcatggcgcctagcacggaacatatttacgatagtgttgccggaagcacgctgctaataaatagcaatcgtaatgaacagacttcagaacactacgtaattaatgagacagagactgttgaagtacttaatgaagataccaaacagaatcctaactttcatccaatcctttcgtaaattataataaaaccagtattgtagcaagtcaaatccgtttattacagaactcaacaataaatttagtgagaataatccgtttagacgagtacatagcgatgattatcttaataagcaagaacaagaccaagaacaagatcgtgaacacgatgatatagaatcatcggttggcgtgattggtttccttttttataaaattgaagtaatatttagtattaatcgctgccgtcacgttgtacaaatggagatattccctgtactcagcatttctaaaattagcaattttattgctaataatgactgtagatattaatatagatgcagaacatcaaaaaattatatctgatgagatcaatagacagatggatgaaacggtacttcttaccaacatcttaagcgtagaagttgtaaacgacaatgagatgtaccatcttattcctcatagactatcgacgattatactctgtattagttctgtcggaggatgtgttatctctatagataatgacgtcaatgacaaaaatattctaacctttcccattgatcattgtaatcatatccccactgagtaaatgtgtcgtagttagcaagggtcctacgaccatattggttgttaaagcggatatatccagcaaacgactactatatgtaaacaatctgtcactgattaattatttgccgttgtctgtattcattattagacgagttaccgactatttggatagacacatatgcgatcagatatttgcgaataataagtggtattccattataaccatcgacaataagcagtttcctattccatcaaactgtataggtatgtcctctgccaagtacatacattctagcatcgcacaagatactttaatccatgtttgtaacctcgagcatccgttcgactcagtatacaaaaaatgtagtcgtgcaattctctacctatcaaggaacaaatattgtacggcagaattgataatataaatatgagaattagtatttctgtggattaatagatttctagtatgggatcattaatcatctctaaatacctcataaaacgaaaaaatgctgctacaaatgaaaaaaagctattatcaaatactgtacggaatggattcattcttttctctttttatgaaactctgttgtatatctactgataaaactggaagcaaaaaaatctgataggaagaacaaggattatatggaacacgattattataaaataacaatagttcctggttcctcttccacgtcgactagctcgtggtattatacacatgcctagtaatagtctctttgcgttgacggaaagtagactagaaataacaggctaaaatgttcagacaccataatagttcccaacccagataataacagagttccatcaacacattcctttaaactcaatcccaaacccaaaaccgttaaaatgtatccagccaattgatagtaaataattaggtgtacagcacatgataatttacacagtaaccaaaatgaaaacactttagtaattataagaaatatagacggtaatgttatcatcaacaatccgataatatgccggagagtaaacattgacggataaaacaaaaatgccccgcataactctatcatggcaatgacacaaccaaacacttgtaaaattcctaaattggtagaaaatacaacagatatcgatgtataagcgatttcgagaaataataagaataaagtaatgcccgtaaagataaacatcaacgttgtttggtaatcattaaaccaattagtatgacattgaactaatttcacagtagattttattccagtattgtcaccgcatgtatacgtacctggtaagatatctttatattccataatcaacgagacatcattatccgataacgaatgaagtctagcactagtatgccatttacttaatatagtcgtcttggaagttttattataagttaaaatatcatgattgtccaatttccatctaatatactttgtcggattgtctatagtacatggaataatgatggtatcattgcacgctgtgtactctatggtctttgtagttgttataacaaccaacgtatagaggtatatcaacgatattctaactcttaacatttttatttatttaaatgatacctttgttatttattttattctattttactaactgtatcgaatggcataagtttgaaacgagtgaagaaataatttctacttacttaatagatgatgtattatacacgggcgttaatggggcggtatatacattttcaaataatgaactaaacaaaactggtttaactaataacaataattatatcacaacatctataaaagtagaggatacattagtatgcggaaccaataacggaaaccccaaatgttggaaaatagacggttccgaagatccaaaatatagaggtagaggatatgctccttatcaaaatagtaaagtgacgataatcagtcataacgaatgtgtactatctgatataaacatatcaaaagaaggaattaaaagatggagaagatttgacggaccatgtggttatgatttatacacggcagataacgtgattccaaaagatggtgtgcgtggagcattcgttgataaagacggcacttatgacaaagtttacattcttttcactgatactatcgacacaaagagaattgttaaaattccgtatatagcacaaatgtgcttaaatgacgaaggtggtccatcatcattgtctagtcatagatggtcgacgtttctcaaggtcgaattagaatgtgatatcgacggaagaagttatagacaaattattcattctaaagctataaaaacagataatgatacgatactatatgtattctttgatagtccttattccaagtccgcattatgtacctattctatgaatgccattaaacactctttttctacgtcaaaattgggaggatatacaaagcaattgccgtctccagctcctggtatatgtctaccagctggaaaagttgttccacataccacgtttgacatcatagaacaatataatgagctagatgatattataaagcctttatctcaacctatcttcgaaggaccgtctggtgttaaatggttcgatataaaggagaaggaaaatgaacatcgggaatatagaatatacttcataaaagaaaatactatatattcgttcgatacaaaatctaaacaaactcgtagtgcacaagttgatgcgcgactattttcagtaatggtaacttcgaaaccgttatttatagcagatatagggataggagtaggaataccacgaatgaaaaaaatacttaaaatgtaatcttaatcgagtcaccacatgacaatgaacaaacctaagacagattatgctttatgcttgttgtgttgtaatatgtggtctgattatcggaattatttttacagcaacgctattaaaagttgtagaacgtaaattagttcatacaccatcaatagataagacgataaaagatgcatacattagagaagattgtctgactgactggataagctataataaatgtatccatttatctactgatcgaaaaacctggaaggaaggacgtaatatgcaaagctctaaatccaaattctgatctaattaagatagagactcccaaacgagttaagctttttaagacgccttagaagaggctattgggtaggagaatccgaaatattaaaccagacaaccacatataattttatagctaagaataccacaaagaatggaactaaaaacggaaatatatttgtagtacaactaatattcccccccccccccccccccccaaactgcattcgtggttacactatataatataataatacataaaactatgctacatttttatcataacactatttctgttagatggtttagaaaaaaaataaatatctccgtaccgttcttgtttttataaaaataacaattaacaattaacaaattttttctttaatattttacgtggttgaccattcttggtggtaaaataatctcttagtgttggaatggaatactgtttaatgtttccacattcatcgtatattttgacgtatgcagtcacatcgtttacacaatagtcagactgtagttctatcatgcttcctacattagaaggaggaacagttttaaagtctcttggttttaatctattgccgtttttcatgaaatcctttgttttatccacttcacattttaaataaatgtccactatacattcttctgttaattttactagatcgtcatgggtcatagaatttataggttccgtagtccatggatccaaactagcaaacttcgcgtatacggtatctcgattagtgtatacaccaactgtatgaaaattaagaaaacagtttaatagatcgacagaaatatttaatcctccgtttgatacagatgcaccatatttatggatttcggattcacacgttgtttgtctgaggggttcgtctagcgttgcgtctacataaacttcgattccaatatattctttattgtcagaattacatatagatgtatcaccattatacactgtttctgaagttgttcgaacactaaatggtaggcacatcaaaatagtaaataataacaagtacatttctgcaatattgtatcgtacttggaaaattagtgttcgagtgagttggattatgtgagatttggattgtctatctttattttatgttttatattagaattgactgatatgacaagtttattccaatagattcttattaaaaacatatataataaataacaatggcggccgaatggcataaaattatcgaggatgtttcaaaaaataataagtttgaggatgccgccatcgtcgattacaagactaaaaagaatgttctagcagccattcctaacagaacatttgcaaagatcattccaggtgaagtaattgctctaatcactaatcgtaatattctaaaacctcgtataggtcaaaaattttttattgtatacactaactctctgatggatgagaacacatataccatggagttgcttactggatacgcaccagtatctccgattgttatagcgagaacacacaccgcactcatctttttgatgggtaagcctacgacatccagacgtgaagtttatagaacgtgcagagattatgccactaatgtgcgagcaactggtaattaatatgaaaaaataacattaattattaacgttaatttttaaatgatgaggaaatggagcatatccatattgactatatcaataattccggtattatcatacacctcatcgatttttagattacatttagacaatgaattggagttatgttatgggaaattacaatttgataagttgagtaatgtaaatataaaatacattcctgagtatattccatacagatataattttattaatagcacattaactgtggacgaagccaagaagtataatgttgtttttacacgtagttcatttttaaaatatagatacgctagtaatttagatactggtttggttgtcgcgttagccgtacacttaaaatataatgatgtgcgatgtttagtaaatgtatcatgtttcattaaaaatttgatgacacatacatctactatattaacatcaaagcatgtgacttattcgttgcgtcgatccaggtgtaatattataataggatacgattctatcatatggtataaagataatatatcagatcattataatgaagaattatattataacggtatctatgactttactgcaatatgcatgttaatagcatctacagtgatagtattagtatactttttaaaaagaataaaaatgaactatttgattactattattaaaaatggataaaatcaaaattacagttgattcaaaaatcggtagcgtggttaccatatcttacaacttggaaaagataacaattgacgtcgtccccaaaaaaagaaaaggagatagtgattgtcactgaagaagtggtaaaagatattatcgatattgttgatgacatggatatagagagtgtatcatgtgatctataaaaataggtattaatcaatactttttatttacggtactgcaccgattactttatactttttatttacggtactcttatgccatgacctacattattccctattttaaaaaaatattattctaattcttctagccatttcctagttcgttcaaatgctacatcgacgtcaaagataggcgagtagttgaaatctagttctgccttgttggtacgtacctcgaaggcggtattggatatcttcaacgtatatttgtttaatagagatgatttcctaaatagaattctcttaatatcattcttacatgcgtgcgtttttagtacccatcttggaaccctagatccttgttctattcccagtggtttcatcaatagaagattaaacatgtcatacgagcacgatggagagttatcgtagcaaaagtaagcatttcctttaatctcagatcccggatactggatatattttgcagccaacacgtgcatccatgcaacatttcctacatatacccggctatgcaccgcgccatcatcgactgtacgatacataatgttaccatgttgcttacattgcttgtaaaagactttcatcaatttgtctccttctccgtaaatttcagtgggtcttaggcaacaagtatacaattttgctccattcatgattacggaattattggctttcataaccagttgctcagccatacgtttactttttgcgtaaacatgtcctggtgatatatcataaagggtatgctcatggccgatgaatggatcaccgtgtttatttggtcctattgcttccatgctactagtatagatcaaatacttgattcctaggtccacacaagctgccaatatagtctgtgttccataatagtttactttcatgatttcattatcggtgtattttccaaatacatccactagggcggccgtatgaataatcagatttaccccatctagtgcctctctcaccttatcaaagtcgtttatatcacattgtatgtaatttataactttaaccttcgatgtgagcggttgtggatcttcttcgacatcgatgactctgatttcctgaacatcatctgcactaattagaagtttgacgatatacctgcctagaaatccggcaccaccagtaaccgcgtacacggccattgctcgccactcgtaatagcagactacttattctattttactaaataatggctgtttgtataatagaccacgataatatcagaggagttatttactttgaaccagtccatggaaaagataaagttttaggatcagttattggattaaaatccggaacgtatagtttgataattcatcgttacggagatattagtcgaggatgtgattccatagacagtccagaaatatttatcggtaacatctttgtaaacagatatggtgtagcatatgtttatttagatacagatgtaaatatatctacaattattggaaaggcgttatctatttcaaaaaatgatcagagattagcgtgtggagtcattggtatttctttcataaatgaaaagataatacattttcttacaattaacgagaatggcgtttgatatatcagttaatgcgtctaaaacaataaatgcattagtttacttttctactcagcaaaataaattagtcatacgtaatgaagttaatgatacacaatacactgttgaatttgatagggacaaagtagttgacacgtttatttcatataatagacatactgactccatagagataagaggggtgcttccagaggaaactaatattggttgcgcggttaatacgccggttagtatgacttacttgtataataagtatagttttaaactgattttagcagaatatataagacacagaaatactatatccggcaatatttattcggcattgatgacactagatgatttggctattaaacagtatggagacattgatctattatttaatgagaaacttaaagtagactccgattcgggactatttgactttgtcaactttgtaaaggatatgatatgttgtgattctagaatagtagtagctctatctagtctagtatctaaacattgggaattgacaaataaaaagtataggtgtatggcattagccgaacatatagctgatagtattccaatatctgagctatctagactacgatacaatctatgtaagtatctacgcggacacactgagagcatagaggatgaatttgattattttgaagacgatgattcgtctacatgttctgccgtaaccgacagggaaacggatgtataatttttttatagcgtgaaggatatgataaaaatataattattgtatccattccgattccaatcacattatatgattctgtaaaaaaattatactgtaacgcaatgaagtagtctcatagatgtatagaggtcagatactggtttgataaactttttattccacatgagtatgtttgactttatggttagacccgcatactttaacaaatcactgaaaattggagttaggtattgacctctcagaatcagttgccgttctggaacattaaatgtattttttatgatatactccagcgcatttatgttggcatacaacaagtcattactaatggaatattccaagagttttagttgtctagtatttaacaagagaagagatttcaacagactgtttatgaactcgaatgtcgcctcattgtcgcttatattgatgatgtcgaattctcccaatatcatcgccgatgagtagctcatcttgttatcgggatccaagttttctaaagatgtcattaaaccctcgatcatgaatggatttatcatcatcgtttttatgttggacatgagcttagtccgtttgtccacatctatagaagatgatttctgaattatttcatatatctctctctttaacaccaggaacttgtcaggatggtctactttaatatgttctcgtctaagagatgaaaatctttggatggtcgcatgtgacttttctctaaaggatgatgttgcacaagatcctctcttaaatgaatccatcttatccttggacaagatggacagtctattttccttagatggtttgatatttttattacccatgactataaaggtagacctaatcgtctcggatgacctatatatttattttcagttttattatacgcataaattgtaaaaaatatgttaggtttacgaaaatgtctcgtggggcattaatcgtttttgaaggattggacaaatctggaaaaacaacacaatgtatgaacatcatggaatcaataccttcaaacacaataaaataccttaactttcctcagagatccactgtcactggaaaaatgatagatgactatctaactcgtaaaaaaacctataatgatcatatagttaatctattattttgtgcaaatagatgggagtttgcatcttttatacaagaacaactagaacagggaattactttaatagttgatagatacgcgttctctggagtagcgtatgccgccgctaaaggcgcgccaatgactctgagtaagagttatgaatctggattgcctaaacccgacttagttatattcttggaatctggtagcaaagaaattaatagaaacgtcggcgaggaaatttatgaagatgttgaattccaacaaaaggtattacaagaatataaaaaaatgattgaagaaggagatattcattggcaaattatttcttctgaattcgaggaagatgtaaagaaggagttgatcaagaatatagttatagaggctatgcacacggttactggaccagtggggcaactgtggatgtaataaagtgaaattacattttttataaatagatgttagtacagtgttataaatggatgaagcatattactctggcaacttggaatcagtactcggatacgtgtacgatatgcataccgaactcgtatcaatatctcaattagttattgccaagatagaaactatagataatgatatattaaacaaggacattgtaaattttatcatgtgtagatcaaacttggataatccatttatctctttcctagatactgtatatactattatagatcaagagaactatcagactgagttgattaattcattagacgacaatgaaattatcgattgtatagttaacaagtttatgagcttttataaggataacctagaaaatatagtagagatgctatcattactctaaaatatataatgaataacccagattttaaaactacgtatgccgaagtactcggttccagaatagccgatatagatattaaacaagtgatacgtaagaatatactacaattgtctaatgatatccgcgaacgatatttgtgaaaaatattaaaaaaagatactttttttattaaatgacgtcgcttcgcgaatttagaaaattatgctgtgatatatatcacgcatcaggatataaagaaaaatctaaattaatcagagactttataacagatagagatgataccgatacatatttgatcattaagttattgcttcccggattagacgatagaatgtataacatgaacgataaacaaattataaaattatatagtatagtatttaaacaatctcaggaagatatgctacaagatttaggatacggatatataggagacactattaggactttcttcaaagagaacacagaaatccgtccacgagataaaagcattttaactttagaagaagtggatagttttttaactacgttatcatccgtaactaaagaatcgcatcaaataaaattattgactgatatagcatctgtttgtacatgtaatgatttaaaatgtgtagtcatgcttattgataaagatctaaaaattaaagcgggtcctcggtacgtacttaacgctattagtcctcatgcctatgatgtttttagaaaatctaataacttgaaagagataatagaaaatgcggctaaacaaaatctagactctatatctatttctgttatgactccaattaatcccatgttagcggaatcgtgtgattctgtcaataaggcgtttaaaaaatttccatcaggaatgtttgcggaagtcaaatacgatggtgaaagagtacaagttcataaaaaaaataacgagtttgccttctttagtagaaacatgaaaccagtactctctcataaagtggattatctcaaagaatacataccgaaagcatttaaaaaagctacgtctatcgtattggattctgaaattgttcttgtagacgaacataatgtaccgctaccgtttggaagtttaggtatacacaaaaagaaagaatataaaaactctaacatgtgtttgttcgtgtttgactgtttgcactttgatggattcgatatgacggacattccattgtacgaacgaagatcttttctcaaagatgttatggtcgaaatacccaatagaatagtattctcagagttgactaatattagtaacgagtctcagttaaccgatgtattggatgatgcactaacgagaaaattagaaggattggtcttaaaagatattaatggagtatacgaaccgggaaagagaagatggttaaaaataaagcgagactatttgaacgagggttccatggcagattctgccgatttagtagtactaggtgcttactatggtaaaggagcaaagggtggtatcatggcagtctttctaatgggttgttacgacgatgaatccggtaaatggaagacggtaactaaatgttccggccacgatgataatacgttaagggttttacaagaccaattaaagatggttaaaattaacaaggatcccaaaaaaattccagtgtggttggtagttaataaaatctatattcccgattttgtagtagaggatccaaaacaatctcagatatgggaaatttcaggagcagagtttacgtcttcaaagtcacatacagcaaatggaatatcgattagatttcctagatttactaggattagagaagataaaacgtggaaagaatctactcatctaaacgatttagtaaacttgactaaatcttaatagttacatacaaactgaaaattaaaataacactatttagttggtggtcgccatggatggcgttattgtatactgtctaaacgcgttagtaaaacatggcgaggaaataaatcatataaaaaatgatttcatgattaaaccatgttgtgaaagagtttgtgaaaaagtcaagaacgttcacatcgacggacaatctaaaaacaatacagtgattgcagatttgccatatctggataatgctgtatcggatgtatgcaaatcaatatataaaaagaatgtatcaagaatatccagatttgctaatttgataaagataggcgacgatgacaagactcctactggtgtatataattattttaaacctaaagatgccattcctgttattatatccataggaaaggataaagatgtttgtgaactattaatcgcatccgataaagcgtgtgcgtgcatagagttaaattcatataaagtagccattcttcccatgaatgtttccttctttaccaaaggaaatgcgtcattgattattctcctgtttgacttctctatcgacgcggcacctctcttaagaagtgtaaccgataataatgttgttatatctagacacaaacgtctacatgacgagcttccgagttccaattggttcaagttttacataaatatacagtccgactattgttctatattatatatggtagttgatggatctgtgatgtatgcaatagctgataatagaactcacgcaattattagcaaaaatatattagacaatactacgattaacgatgagtgtagatgctgttattttgaaccacagattaagattctcgatagagatgagatgctcaatggatcatcgtgtgatatgaacagacattgtattatgatgaatttacctgatgtaggcgaatttggatctagtatattggggaaatatgtacctgacatgattaagattgctctttcggtggctggtaatttaataagaaatcgagactacattcccgggagacgaggctataactactacgtttacggtatagcatctagataattttttttaagcacaaaataaaaaacataattttaaaccaatctatttcatactattttgtgcgatcaccatggacataaagatagatattagtatttctggtgataaatttacggtgactactagtagggaaaatgaagaaaaaaactactgatgttatcaaacctgattatcttgagtacgatgacttgttagatagagatgagatgtctactattctagaggaatattttatgtacagaggtctattaggcttcagaataaaatatggacgactctttaacgaaattagaaaattcgacaatgatgcggaagaacaattcggtactatagaagaactcaagcagaaacttagattaaattctgaagagggagccgataactttatagattatataaaggtacaaaacgacaggatatcgtcaaacttactgtgtacgattgcatatctatgataggattgtgtgcgtgtgtggtagatgtttggagaaaggagaaactgttttctagatggaaatattgtttacgagcaattaaactgtttattgatgatcacatgcttgataagataaaatctatactgtagaatagactagtgtatgcggaaatgtcatagaaagttaagttaatgagagcaaaaaattataatgttgtattctaatcccatatttattatttttttctgtaatagttagaaaaatacatttgatggtctatctaccagattattatgtgttataaggtactttttctcataataaactagagatgcgtaagatagtgtttttcaaaactataaatctaaaattgatggatgtgatatacagctattaatttcgaaaatatattttaatctgataactttaaacatggatttttgatggtggtttaaagtttaaaaaaatattttgttattgtagtatatgataatatcaaaaagatggatataaagaatttgctgactgtaagtactatttttacattactacattggctacggcagatatacctacttcgtcactgccacacgctccggtaaacgggtcatgtgacgagggagaatatcttgataaaggcataatcaatgttgtaatcagtgtccacctggagaatttgccaaggtcagatgtagtggcagtgataacacaaaatgtgaacgctgcctacctcatacatataccacaatccccaattattctaaatggatgtcatcaatgtagaaaatgcccaacaggatcatttgataaggtaaagtgtaccggaacacataacagtaaatgttcgtgtcttcctggttggtattgcgctactgattcttcacagactgaagattgtcgagattgtataccaaaaaggagatgtccgtgcggatattttggtggaatagatgaacaaggaaatcctatttgtaaatcgtgatgtattggtgaacattgcgactacctacataattatagagttggtccttttcctccatgtaaactatctaaatgtaattaattatgatcttgatataatatgattatcatgttaccatacattatatagctactttggtagtgtattattcagtatgaagacatattaataattacttatctttgaagatcttgttataatcataaatataaaaataaaaatacttatggggcatagtaactcataattgctgacacgataaattcgtaataatctgttttgttcaaatttttataaggaatctaggcataaaaataaaaacataatttataatacacttacaacacccatcatgaataacagcagtgaattaattgctgcgattaatggatttagaaatagtggacgattttgtgatattaatatagttattaatgatgaaaggataaatgctcatagactcatcctatctggagcatccgaatatttttccattctattttctagtgattttatcgattctaatgaatacgaagttaatctaagtcatttagattatcaaagtgtgaacgatttgatcgattacatttatgggatacctttgagcctaactaacgatagcgtgaaatatattctttcaactgctgattttttacaaattggatctgctattacggagtgtgaaaattacatacttaaaaatctctgttctagaaactgtatcgatttctacatatacgctgataaatataataacaagaaaatagaaacagcgtcgtttaacacaatattacgaaatattttgagactcattaacgatgaaaactttaaatacttgacagaggaatcaatgataaaaattttaagcgatgatatgttaaatataaaaaatgaggatttcgcaccactaattctcattaaatggttagagagtacacaacaaccatgcaccgtcgagttacttagatgcctcagaatatcattgctttccccacaagttataaaatcactttatagtcatcgactggttagttcaatctacgaatgtataacattcttaaacaatatagcattcttggatgaatcatttcctagatacaatagcatcgagttgatatctatcggtataagtaattcacgtgataagatttccataaactgctacaatcgtaaaaaaaatacatgggaaatgatatcttcacgtggatataggtgtagtttcgcagtggctgtcatggataatattatctatatgatgggtggatacgatcagtccccgtatagaagttcaaaggttatagcatacaatacatgtactaattcttggatatatgatataccagagctaaaatatccgcgttctaattgcggaggagttgtcgatgacgaatacatttattgtataggtggcatacgcgatcaggattcatcgttgatatctgatattgatagatggaagccatcaaaaccatattggcagacgtatgctaaaatgcgagagccaaaatgtgatatgggggttgcgatgttaaacggattaatatatgtcataggtggagtcgttaaaggtggcacatgtaccgacacactagagagtttatcagaagatggatggatgatgcatcgacgccttccaataaaaatgtccaatatgtcgacgattgttcatgctggaaagatttatatatctggaggttacaccaatagtagtatagttaatgaaatatctaatctagtccttagctataatccgatatatgatgaatggaccaaattatcatcattaaatattcctagaattaatcctgctctatggtcagtgcataataaattatatgtaggaggaatatccgatgatgttcaaactaatacatctgaaacatacgacaaagaaaaagattgttggacattggataatggtcacgtgttaccatacaattatataatgtataaatgcgaaccgattaaacataaatatccattggaaaaaatacagtacacgaatgattttctaaagtgtttggagagttttataggtagttgataaaacaaaatacataattttgtaaaaataaatcactttttatactaatatggcacgattgtcaatacttttgttactaatatcattagtatacgctacaccttatcctcagacacagatatctaaaaaaataggtgatgatgcaactatatcatgtagtcgaaataatacaactgactacgttgttatgagtgcttggtataaggagcccaattccattattctcttagctgccaaaagcgacgtcttgtattttgataattataccaaggataaaatatcttacgattctccatacgatgatctagttacaactatcacaattaaatcattgactgctggagatgccggtacttatgtatgtgcattctttatgacatcgactacaaatgacactgataaagtagattatgaagactactctacagagttgattgtaaatacagatagtgaatcgactatagacataatactatctggatctacacattcaccggaaactagttctgagaaacctgattatatagataattctaattgctcgtcggtattcgaaatcgcgactccggaaccaattactgataaagaagatcatacagtcacagacactgttgtatacactacagtaagtacatcatctggagttgttactactaaatcaaccaccgatgatgcggatctttatgatacgtacaatgataatgaatcatctactgtgttaccaacaactgtagaaagcatcacgaaatctataggtaagtatagtactaaagactttgcagaaatatttggtatcaccgcattaattatattgtctgccgtagcagttttctgtatcacatattatatatgtaataaacggtcacgtaaatacaaaacagagaacaaagtctagatttttgacttacataaatgtctgggatagtaaaatctatcatattgagcggaccatctggttcaggaaagacagccatagccaaaagactgttaaaagactatggaaatatatttggatttgtggtgtcccataccactagatttcctcgtcctatggaacgagaaggtgtcgattaccattacgttaacagagaggccatctggaagggaatagccgctggaaactttctataacatactgagtttttaggaaatatttacggaacttctaaaacagctgtgaatacagcggctattaataatcgtatttgtgtgatggatttaaacatcgacggtgttagaagtcttaaaaatacttacctaatgccttactcggtgtatataagacctacctctcttaaaatggttgagaccaagcttcgtcgtagaaacactgaagcggacgatgagattcatcgtcgtgcgatgttggcaaaacggatatggatgaggccaacgaagcagttctattcgacactattattattgaagatgatgtgaatttagcatatagtaagttaattcagatactacaggaccgtattagaatgtattttaacactaattaagatataatacttgactgacttaaaacttgataattaataatataattcgtttttatatgtgactatttcaacatctaatgtattagttaaatattaaacttaccacataaaacttaaaatttaaaatgatatttcattgacggatagatcacacattatgaactttcaaggacttgtgttaactgacaattgcaaaaatcaatgggtcgttggaccattaataggaaaaggtggattcggtagtatttatactactaatgacaataattatgtagtaaaaatagagcccaaagctaacggatcattatttaccgaacaggcattttatactagagtacttaaaccatccgttatcgaagaatggaaaaaatctcacaatataaagcacgtaggtcttatcacgtgcacggcatttggtctatacaaatccattaatgtggaatatcgattcttggtaattaatagattaggtgcagatctagatgcggtgatcagagccaataataatagactaccaaaaaggtcggtgatgttgatcggaatcgaaatcttaaataccatacaatttatgcacgagcaaggatattctcacggagatattaaagcgagcaatatagtcttggatcagatggataagaataaattatatctagtggattacggattggtttctaaattcatgtctaatggtgaacatgttccatttataagaaatccaaataaaatggataacggtactctagaatttacacctatagattcgcataaaggatacgttgtatcgagacgtggagatctagaaacacttggatattgtatgattagatggttgggaggtatcctgccatggactaagatgtctgaaacaaagaattgtgcattagtaagtgccacaaaacagaaatatgtgaacaatactgcgactttgttaatgaccagtttgcaatacgcacctaaagaattgctacaatatattactatggtaaactctttgacatattttgaggaacccaattacgacgagtttcggcgcgtattaatgaatggagttatgtaaaatttttgttgataaaaaattaaaaaataacttagttatatcactctcgcgagtgcaaccgaaaacatggcgatgttttacacacacgctttcggtgggtacgatgagaaccttcatgcatttcctggaatatcatcgacggtcgccaatgatgtcaggaaatattctgttgtgtcagtttataataaaaagtataagattgtaaaaaacaaatatatgtggtgttacagtcaggtgaacaagagatatattggagcactgctgcctatgtttgagtgcaatgaatatctacaaattggagatccaatccatgatcaagaaggaaatcaaatctctatcatcacatatcgccacaaaaactactatgctctaagcggaatcgggtacgagagtctagacttgtgtttggaaggagtagggattcatcatcacgtacttgaaacaggaaacgctgtatatggaaaagttcaacatgattattctactatcaaagagaaggccaaagaaatgagtgcacttagtccaggacctataattgattaccacgtctggataggagattgtatctgtcaagttactgctgtggacgtacatggaaaggaaattatgagaatgagattcaaaaaaggtgcggtgctacagatcccaaatctggtaaaagttaaacttggggagaatgatacagaaaatctttccactgccatatcagctctcctgaattccggcggtggcacaatcgaggtaacatctaaggaagaacgtgtggattatgtactcatgaaacgtttggaatctatacatcatctgtggtctgtagtgtatgatcatcttaatgttgtgaatggcaaagaacgctgttatgtgcatatgcattcatctaatcaacatcctataccgagtactgtaaaaacaaatttgtacatgaagactatgggatcatgtcttcaaatggactccatggaagctctagagtatcttagtgaactgaaggaatcaggtggacggagtcccagaccagaattgcagaaatttgaatatccagatggagtggaagacactgaatcaattgagagattggcagaggagttcttcaatagatcagaacttcaggctggtgaatcagtcaaatttggtaattctattaatgttaaacatacatctgtttcagctaagcaactaagaacacgtatacggcagcagcttccttctatactctcatcttttgccaacacagagggtggatatttgttcattggagttgataataatacacacaaagtaattggattcacggtgggtcacgactacctcagactggtagagaatgatatagaaaagcatatcaaaagacttcgtgttgtgcatttctgtgagaagaaagaggacatcaagtacgcgtgtcgattcatcaaggtatataaacctggggatgagactacctcgacatacatgtgtgctatcaaagtggaaagatgctgttgtgctgtgtttgcagattggccagaatcatggtatatggatactaatggtatcaagaagtattctccagatgaatgggtgtcatatataaaagtttaattaatgtaactatagagaaaataataggttgtatcatatagacaataactaacaattaattagtaactgttatctctttttaactaactaactaactaactatatacctattaataatacatcgtagttatagttcttaacatctattaatcattgattcgcttctttaattttttataaactaacattgttaattgaaaagggataacatgttacagaatataaattatatatggatttttttaaaaaggaaatacttgactggagtatatatttatctcttcattatatagcacgcgcgtgttccaattcttccacatcccatataatacaggattataatcttgttcgaacatacgagaaagtggataaaaaaatagttgattttttatctaggtggccaaatttattccatgtttcagaatatggggaaaatattctacatatttattctatggatgatgctaatgcgaatattataattttttttctagatagagtattaaatattaataagaaccgcgggtcatttatacataatctcgggttatcatccattaatataaaagaatatatatatcaatatcaattagttaataatgatcatctagataataggataagactaatgcttgaaaatggacgtagatcaagacattttttgtcctatatattagatacagttaatatctatatatgtattttaataaatcatggattttacatagatgctgaagacagttacggttgtacattattacatagatgtatatatcactataagaaatcagaatcacacaatgaattaattaagatgttgttaaataatggatcagatgtagataaaaaagatacgtacggaaacacaccgtttatcctattatgtaaacacgatatcgacaacgcggaattgtttgagatatgtttagagaatgctaatatagactctatggactttaatggatatacacctcttcattatgtctcgtgtcgcaataaatatgattttgtaaagtcattaatttctaaaggagcaaatgttaatgcgcgtaataaattcggaactactccattttattgtggaattatacacggtatctctcttataaagctatatttggaattagacatagcgttagaaatagataatgaacatatagttcgtcatttaataatttttgatgctattgaagctttggattatctattatccaaaggagttattgatattaactatcgtactatatacaacgaaacatctatttatgacgccgtcagttataatgcgtataatacgttggtctatctattaaacagaaatggtgattttgagacgattactactagtggatgtacatgtatttcggaagcagtcgcgaacaacaacaaaataataatggaagtactattgtctaaacgaccatctttgaaaattatgatacagtctatgatagcaattactaaacataaacaacataatgcagatttattgaaaatgtgtataaaatatactgcgtgtatgaccgattatgatactcttatagatgtacaatcgctacagcaatataaatggtatattttaaaatgtttcgatgaaatagatatcatgaagagatgttatataaaaaataaaactgtattccaattagttttttgtatcaaagacattaatactttaatgagatacggtagacatccttctttcgtgaaatgcgctagtctcgacgtatacggaagtcgtgtacgtaatatcatagcatctattagatatcgtcagagattaattagtctattatccaagaagctggatgcgggagataaatggtcgtgttttcctaacgaaataaaatataaaatattggaaaactttaacgataacgaactgtccacatatctaaaaaatcttataaacactattaaaatataaaatctaagtaggataaaatcacactacattattgtttccttttagtactcgacagtgtatactatttttaacactcataaataaaaatgaaaacgatttccgttgttacgttgttatgcgtactaccggctgttgtttattcaacatgtactgtacccactatgaataacgctaaattaacgtctaccgaaacatcgtttaatgataaacataaagttacgtttacatgtgatcagggatatcattctttggatccaaacgctgtctgtgaaacagataaatggaaatacgaaaatccatgcaagaaaatgtgcacagtttctgattatgtctctgaactatatgataagccattatacgaagtgaattccaccatgacactacgttgcaacagcgaaacaaaatattttcgttgcgaagaaaaaaatggaaatacttcttggaatgatactgttacgtgtcctaatgcggaatgtcaacctcttcgattagaacacggatcgtgtcaaccagttaaagaaaaatactcatttggggaatatatgactatcaactgtgatgttggatatgaggttattggtgcttcgtacataagttgtacagctaattcttggaatgttattccatcatgtcaacaaaaatgtgatataccgtctctatctaatggattaatttccggatctacattttctatcggtggcgttatacatcttagttgtaaaagtggttttacactaacggggtctccatcatccacatgtattgacggtaaatggaatcccatactcccgacatgtgtacgatctaacgaagaatttgatccgatagatgatgatcccgatgacgagacagatctgagcaagatctcgaaagacgttgtacaatatgaacaagaaatagaatcgttagaagcaacttatcatataatcatagtagcgttgacaattatgggtgttatatttttaatctccattatagtattagtttgttcctgtgacaaaactaatgaccaatataagttccataaattgctgccgtgaatatgaatacgttaaaaattaatgaataattaataattaataattaataattaattaattaataattaataattaataataaataataaataataaataataaataacgaacaagtatcaaaagattaaagaattgctagaatcaattgagatgtcttcttcagtggatgttgatatctacgatgccgttagagcatttttactcaggcactattgtgacaagagatttattgtgtatggaagaagtaacgccatattacataatatatacaggctatttacaagacgcgctattataccgttcgatgatgtagtacgtactatgccaaatgaatcacgtgttaaacaatgggtgatcgatacacttaatgatataatgacgaaggaacacgatgtttctgtaagcgtcagcaccggaatactattcatggaaatgtttttcgattacaataaaaataattccaaaaatagtatcaacaatcaactaatgtatgatataattaatagcgtatctataattctagctaatgagagatatagaagcgcttttaacgacgatggtatatacatccgtagaactatgattgacaagttgtacgaatacgcatctctaactactattggtatgattactggaggtatttgttattatctgttgatgcatctagttagtttgtataaataattatttcaatatactagttaaaattttaagatttttaaatgtataaaaaactaataacgtttttatttgtaataggtgcagtagcatcttattcgaataatgagtacactccgtttaataaacttagtgtaaaactgtatatagatggagtagataatatagaaaattcatatactgataataatgaattggtgttaaattttaaagagtacacaatttctattattacagagtcatgcgacgtcggatttgattccatagatatagatgttataaacgactataaaattcttgatatgtataccattgactcgtctaccattcaacgcagaggtcacacatgcaaaatatctaccaaattatcatgccattatgataagcacccttatattcacaaatatgagggtgatgagcgacaatattctattactgcagagggaaaatgctataaaggaataaaatatgaaataagtatgatgcacgatgatacgctattgagaaaacatactcttaaaattggatctacttatatattcgatcgccatggacatagtaatacatattattcaaaatatgatttttaaaaatttaaaatatattatcccttcagtgaccgtagtcaaataacaaacaacaccatgagagctataattctcacagttttgttcattaatagtataaatgctacaataactagttataagtttgaatccgtcaattttgattccaaaattgaatggactgggaatggtctatacaatatatcccttagaaattatggaataaagacgtggcaaacgatgtatacaaatgtaccagagggaacatacgacatatccggatttccaaataatgatttcgtatctttctgggttaaatttgaacaaggcgattataaagtggacaagtattgtacgggactatgcatcgaagtaaaaattggaccaccgactgtaacattgactgaatacgacgaccatatcaatttgtacatcgagcatccgtatgccactagaggtagcaagaagattcctatttataaacgcaatgacatgtgtgatatctacttgttgtatacggctaacttcacattcggagactctgaagaaccagtaatatatgatattgatgactacgattgtacgtctacaggttgcagtatagactttgccacaacagaaaaagtgtgtgttatggcacagggagccacagaagggcttcttgataaaattacgccatggagttcggaagtatgtctgacacctaaaaagaatgtatatacatgcgcaattagatccaaagaagatgttcccaatttcaaggaaaaaatgaccagagttatcaagagaaaatttaataaacagtcacactcgtatttgaccaaatttctcggtagtacatcaaatgatattacaacttttcttagcatgcttgactaaatattcataatgaactctctaaactatttttatcaaaaaataaaacaatcactagtattaattttgataacgtagcataatcaacataacctcatcatctattaactgataacggttagttataatagggataaaggattaatgattatttctaaacatggttcggagcttgaaacagaattcatgctctcccttaaaacggatatcgttgataaattcgaaacagtatatttaaacaaaaatatatatcattggaggcgttaaacagaatggagaatcgtctgatcaaatattgagcgtcgatctatcgacaaaaagattaacaatagagccatctcttaacgataaaagaataggagccgctgcagcagtcataaatggacgcatttatgttattggtggacgagatggatcaaattatctaaacactgtagaaagttggaaacctattgataacaagtggagatacgaaacaccgataaattataaaagaagcagtgattccgctgtttcagttaataatactattttcgtaactggtggattatccataaataattccaataatacaattgtgattaataacatggaaaaacttaaacttaacgtttatgaagacaaacaaacaatggtcgattatagaaatgcctatggctagggtatatcacggtatcgactcgacatttggaatgttatattttgccggaggtctatccgttaccgaacaatatggtaatttagagaaaaacaacgagatatcttgttacaatcctagaacgaataagtggtttgatatttcatatactaattataagagatccgtatcatcattgtgtaaactaaataacgtcttctatgtatttagtaaggacattggatatgtggaaaagtatgatggtgcatggaagttagacatgatagtctcccagctataaaggcattttccacttctccttattgattgaaaatgaaaatatacatagttttttacgcatagcagtatctcaccctatagttttattgcttctaacatggatacagatgttacagatacagatacagatacagatacagatacagatacagatgttacaaatgtagaagatatcatgaatgaaatagatagagagaaagaagaaatactaaaaaatgtagaaatggaaaataataaaaatattaacaagaatcatcccagcaaatatattagagaagcgctcgttattaataccagtagtaatagtgattccattgataaagaagttatagaatgtattagtcaggatgtaggaatatagatcatatatactaatttttataatcgatacaaaacataaaaacaactcgttattacatagcaggcatggaatccttcaagtattgttttgataacgatggcaataaatggattattggaaacactttatattctggtaattcgatactctataaggtcagaaaaaatttcactagttcgttctacaattacgtaatgaagatagatcacaaatcacacaggccattattgtctgaaatacggttctatatatctgtattggatcctttgactatcgacaactggaaaagggaacgcggtataaagtatttggctattccatacttgtatggaattggagaaactgacgactataggttctttgttataaagaatttgggaagagtattcgctgctccaaaggatacggaatcagtattcgatgcatgcgtcactatgataaacacgttagagtttatacactctcgaggatttacccatggaaaaatagaacctaggaatatactgattagaaataaacgtctttcactaattgactattctagaactaacaaactctacaagagtggagatggatattcacatatagattacaacgaggacgtgataacttcaggaaatatcaattatatgagtgtagacaatcatctcggagccacagtttcgagacgaggagatttagaaatgttgggatattgcatgatagaatggttcggtggcaaacttccatggaaaaacgaaagtggtatgaaagcaatacaacagaaaagagaatataaaaaatttatagctactttctttgaggactgttttccggaaggaaatgaacctctggaattagttagatatatagaattagtatacacgttagattattctcaaactcctaattatgacagactacgtagactgtttatacaagattgaaattatattctttttttatagggcgttgtgatagttacggatatcttaatatttagactatctctgtcactacacgaccaaatcgattactatggatatcttcagggagatcgcatcttctatgaaaggagagaacgtattcatttcttcagcgtcaatctcgtcagtattgacaatattgtattatggagctaacggatccactgctgaacagctatcaaaatatgtagaaaaggaggagaacaatgatacggttaatgctcagtgtatctcattcaaatccatgaataaagtatatgggagatattctgccatgtttaaagattcctttttgagaaaaattggcgataatttccaaactgttgacttcactgattgtcgcactatagatgctatcaataagtgtgttgatatttttactgaggggaaaatcaatccactattgactgaacaattgtctccagatacccgtctcctagcaattagtgccgtatactttaaagcaaaatggttgatgccattcgaaaaggaattcaccagtgattatccattttacgtatcaccaacggaaatggtagacgtaagtatgatgtctatgtacggcgagccatttaatcacgcatctgtaaaagaatcattcggcaacttttcaatcatagaactaccatatgttggagatactagtatgatggtaattcttccagacaagattgatggattagaatccatagaacaaaatctaacagatacaaattttaagaaatggtgtaactctctggaagctacgtttatcgatgtacacattcccaagtttaaggtaacaggctcgtataatctggtggatactctagtaaagttgggactgacagatgtattctgttcaactggagattatagcaatatgtgtaattcagatgtgagtgtcgacgctatgatccacaaaacgtatatagatgtcaatgaagagtatacagaagcagctgcagcaacttgtgcactggtgtcagactgtgcatcaacagttacaaatgagttctgtgcagatcatccgttcatctatgtgattaggcatgttgatggcaaaattcttttcgttggtagatattgctctccaacaactaattaagcacattcttaaatagaatattatatagttaagattgttactaactggttaacattttttaaaaaatagaaaaaacatatgacattagcgcaggtcgttattcttccaattgcaattggtaagatgacggccaactttagtacccacgtcttttcaccacagcactgtggatgtgatagactgaccagtattgatgacgtcagacaatgtttgactgaatatatttattggtcttcctatgcataccgcaacaggcaatgtgctggacaattgtattcaacgctcctctcttttagagatgatgctgaatcagtgttcatcgacattcgcgagctggtgaaaaatatgccgtgggatgatgtcaaagattgtgcagaaatcatccgttgttatataccggatgagcaaaaaaccatcagagagatttcgtctatcatcggactttgtgcatatgctgctacttactggggaggtgaagaccatcctactagtaacagtctgaatgcattgtttgtgatgctcgagctgctcaattacgtggattataacatcatattccggcgtatgaattgattgatttcgtacatcttgacttcagctcttcccctcccctctttccccattccccagaaacgcttttttacccactataaaataaaatgagtgcattattgactattctattgcctatatttttttattcttcattcattcatacttttaacaatattgaatgtatcgacaacgggctatattttacatcattcatggagttagaaaaagagccggtaatcctgccatgccctcaaataaacaccctgtcgtcaggatataatgtattagatattatatgggaaaaacgaggagctgataatgataacattataccgatagataatggtaccaatatgctaattctgaatccgacacaaactgactctggtatctatatatgtattaccaagaacgagacctactgcgatatgatgtcactgaatttgacaatcgtgaccgatacagaatcaaatatagatcttatctcgtatccacaaatagtaaatgaacgatctacaggtgaaatggtatgtcccaatattaatgcatttattgctagaaataaagacgtggatgttgatgttatatggagaggacatccacgactcagaaataagagacttacacaacgaccaattggaattattactatagaagatgttagaaaaaatgatgctggttattacacatgtgttttaaaatatacatacagggataagacatatgaagtaactagaattgtaaaattagaggtacgggatagaatcatacctcctactatgcaattaccagtagtcgttatgacttcactaggtagtaatttaactattgcgtgtagagtatcgttgagacctcccacaattgatgcagatgtcttttggataagtaataatgagtattacgaagaagatgatgaggatagcgacggtagaagtgtaacaaatagaatctttacgattgataaaagacgtgttattacatcgcggttaaacattaatcccgtaaaggaagacgatgctacaacgtttacatgtatggcgtttactgtacataatagtattagcaaaacagttactattagcataaagtgattacactaccatcttatttcattctatttcgggttaacagtttataaaaaatttttatttattatcatcaagcaaacaattaacgaacgtattgctgtgattaactcccacaatactatgcatagtattgatcattaacttgcagaacagtcctagtactattttaacgtaatcgtgttcttgtgtaattgcagtatctatattataaaagtacgtaaacctagctatagttttattttttaattttagataatagacagtctccttatttttaaaaattgttacatcctttattaaatcatgaatggggacttctatggaatcattagtatgttgtgaacaacaagagcagacatcaataggaaatggtggaagacgatacactgttctatgtagttttaaaatacacatgaactttgaagaatttatataaatcattccatcgatacatccttctatattgacatgtatatatccaggaattcttttattaatgtcaggaaatgtataaactaaaacatttcccgggagcggagcttctaccggtgttatatcagtttttaacttacaaaatgtaaccaatacctttgcatgacttgttttgttcggtaacgttagtttaaacttgacgaatggattaattacaataacatgatccgcgcatctattaagtttttttactttaacacccttgtatgtttttacagagactttatctaaatttctagtgcttgtatgtgttataaatataacgggatatagaactgaatcacctaccttagatacccaattacattttatcagatccagataataaacaaattttgtcgccctaactaattctatattgttatatattttacaattggttatgatatcatgtaataacttggaatctaacgcgcatcgtcgtacgtttacacaattgtgatttagtgtagtatatctacacatgtatttttccgcactatagtattctggactagtgataaaactatcattatatcgatcttcgatgaactcatcgagatattgctctctgtcatattcatacacctgcataaactttctagacattttacaatctgtgttattttaggatcatatttacatatttacgatatatcaaagatgttagatatagttaatgggactcgtttataataatgaatattaaacaattaaacaattatatgagaactttatacccacaaagcatcataaaaatgagtcgtcgtccgatttatgtcttaaatatcaatcgcaattcaactcataaaatacaagagaatgaaatatatacatattttagttattgcaatatagaccatacgtctacagaacttaattttgtagttaaaaactatgatctaaacagacgacaacctgtaactgggtatactgcactacactgctatttgtataataattactttacaaacgatgtactgaagatattattaaatcatgacgtggatgtaacgatgaaaaccagtagcggacgtatgcctgtttatatattgcttactagatgttgcaatatttcacatgatgtagtgatagatatgatagccaaagataaaaaccacttatcacatagagactattccaacctactactagagtatataaaatctcgttacatgttattgaaggaagaggatattgatgagaacatagtatcaactttattagataagggaatcgatcctaactttaaacaagacggatataccgcgttacattattattatttgtgtctcgcacacatttataaaccaggtgagtgtagaaaaccgataacgataaaaaaggccaagcgaattatttctttgtttatacaacatggagctaatataaacgagttagataattgcggcaatacaccattccatttatatcttgtagttgaaacttgtaataatatccatatgactaaaatgctattgatttttaatccgaatttcgaaatacgtaataatcatggattaacgcctatactatcttatataacttccgactacatacaacatgatattcttgtcatgttaatacatcactatgaaacaaatgttggagaaatgccgatagatgagcgtcgcatgatcgtattcgaatttatcaaaacatattctacacatccatcagattcgataacttatttgatgaataggtttaaaaatatagatattcatacccgttatgaaggaaagacgttattacacgtagcatgtgaatacaataatacacacgtaatagattatcttatacgtatcaatggagatataaatgcgttaaccgacaataacaaacacgctatccaactcattatagataacaaagaaaattccccgtataccatcgattgtttattgtatatacttagatatattgtagataagaatgtgataagatcgttggtggatcaagttccatctctacctatcttcaatataaaatcatttgagaaattcatatcctactgtatacttttagatgacacattttatgatagacacgttcaaaatcgcgattctaaaacgtatcgatacacattttcaaaatacatgtcgtttgataaatacgatgatataataactaaatgtcatgaagaaacaatattgctcaaactatccactgttctagatactacactatatacagttttaagatgtcataattcgagaaagttaagaagatacctcaatgaattaaaaaaatatattaatgatacgtccttcaaaatatattctaatattatgaatgagagataccttaatgtatattataaatatatgtacgtgtcaaaagtatacaataaactatttcctgttttcacggataaaaattgtctactaacattactaccttcagaaattatatatgaaatattatacatgttgacaatttacgatctttataatatatcgtatccatctaccaaagtatagttgtatttttatcatgtgttatgtgtaaaaactgatattatataattatcttagtaccgtatgatgaaaatgacgatgaaaatgatggtccgtatatattttgtatcattatcattatcattatcattattgctattccatagctacgccatagacatcgaaaatgaaatcacagaattcttcaataaaatgagagatactctaccagctaaagactctaaatggttgaatccatcatgtatgtttggaggcacaatgaatgatatggccgctctaggagagccgttcagtgcaaagtgtccgcctattgaagacagtcttttatcgcatagatataacgataaagacaatgtggttaactgggagaagataggaaagactagacgacctcttaatagacgtgttaaaaacggtgacttatggatagccaactatacatctaacgacagtcatcgtaggtatttgtgtaccgtaaccacaaagaatggtgactgtgttcagggtatagtaagatctcatattagaaaacctccttcatgcattccagaaacatatgaactaggtactcatgataagtatggcatagacttatactgtggaattctttacgcgaaacattataataatataacttggtataaaaataatcaagaactcattatcgatggtactaagtattcacaatctggtcagaatttaattattcataatccagagttagaagatagtggaagatacgactgttacgttcattacgacgacgttagaatcaagaatgatatcgtagtatcaagatgtaaaatacttacggttataccgtcacaagaccacaggtttaaactaatactagatccgaaaatcaacgtaacgataggagaacctgccaatataacatgcactgctgtgtcgacgtcattattggtcgacgatgtactgattgattgggaaaatccatccggatggattataggattagattttggtgtatactctattttaactagtagtggcggtatcactgaggcgaccttgtactttgaaaatgttactgaagaatatataggcaatacatatacatgtcgtggacacaactattattttgataaaactcttacaactacagtagtattggagtaaatacacaatgcatttttatatacattactgaattattactgaattattattattattattattattattaattatatcgtattgtgctatagaatggatgaagatacgcgactatctagatatttgtatctcaccgatagagaacatataaatgtagactctattaaacagttgtgtaaaatatcagatcctaatgcatgttatagatgtggatgtacggctttacatgagtacttttataattatagatcagtcaacggaaaatacaagtatagatacaacggttactatcaatattattcatctagtgattatgaaaattataatgaatattattatgatgattatgatagaactggtatgaacagcgagagtgagagtgataatatatcaatcaaaacagaatatgagaatgaatatgaattctatgatgaaacacaagatcaaagtacacaactagtaggttacgacattaaactcaaaaccaatgaggttgattttgtggatgaattctatggctatgatagatcagtgagtgtccatgattatatagatgaatcaatcaattaataaagtagtatatggaagagagtctcacgtaagatggcgggatatatggcaagaacataatgatagcgtatacagtataggaaaggagtgcatagataatatatacgaagacaaccataccgtagacgaattctacaatatagacagcgtatcagatgtagatgacgcggaacacatatctcagataactaatgatgtatctacacaaacgggaaaaagaaatcagagttagatagatacatggaaatgtatcctcgtcatagatatagtaagcattctgtctttaagggattttctgacaaagttagaaaaaatgatttagacatgaatgtggtaaaagaattactttctaacggtgcatctctaacaatcaaggatagcagtaataaggatccagtacccttcacctaattccaaacccacccgctttttatagtaagtttttcacccataaataataaatacaataattaatttctcgtaaaagtagaaaatatattctaatttattgcacggtaaggaagtagatcataacaccatggtgagcaagggcgaggagctgttcaccggggtggtgcccatcctggtcgagctggacggcgacgtaaacggccacaagttcagcgtgtccggcgagggcgagggcgatgccacctacggcaagctgaccctgaagttcatctgcaccaccggcaagctgcccgtgccctggcccaccctcgtgaccaccctgacctacggcgtgcagtgcttcagccgctaccccgaccacatgaagcagcacgacttcttcaagtccgccatgcccgaaggctacgtccaggagcgcaccatcttcttcaaggacgacggcaactacaagacccgcgccgaggtgaagttcgagggcgacaccctggtgaaccgcatcgagctgaagggcatcgacttcaaggaggacggcaacatcctggggcacaagctggagtacaactacaacagccacaacgtctatatcatggccgacaagcagaagaacggcatcaaggtgaacttcaagatccgccacaacatcgaggacggcagcgtgcagctcgccgaccactaccagcagaacacccccatcggcgacggccccgtgctgctgcccgacaaccactacctgagcacccagtccgccctgagcaaagaccccaacgagaagcgcgatcacatggtcctgctggagttcgtgaccgccgccgggatcactctcggcatggacgagctgtacaagtaaaagggtcaagacaattctgcagatatcattaacaaacatacaactattgatgaacgccggtatatagtacactcctatctaaaaaattatagaaatttcgattatccatttttcaggaagttagttttgactaataaacatggtctcaacaattattataatgtaggtgatagcaaatatggaacaccgctacatatattggcgtctaataaaaaattaataactcctaattacatgaagttattagtgtataacggaaatgatataaacgcacgaggcgaagatacacaaatgcgaaccccattacacaaatatttgtgtaaatttgtatatcataatattgaatatgttgtccgatactacaatgaaaagattatagacgcatttatagaattaggagccgatctaactattccaaataacgatggactgataccagtaatttactgtattatagtaaatgccgaatatggttataacaatattactaacataaagataatacgtaaactacttaatcttagcagacatgctccacataatctatttagagatcgagtcatgcacgattatataagtaatacatatattgatcttgagtgtttagatattattagatcgttggatggattcgatatcaatggttactttgaaggacgtacaccacttcattgcgctatacaacataacttcactcagattgcggaatacttattagatcgaggagctgatatatcattaaagacagactatggcaaaactgtatttgatttatcattatgtagttacatccctcttaaatggactagctttttgattagtcgtctaccgcctaaaagtgtcatatgctcactgactaaccatataatagattatgttcttacgaacaatagacctattatttggcagagtcaaatgattaataagtacgtgctgttactggatccatccttttattctagattcagaaatgctatcgaaagcaaattaaatcaatacaataatcgttataataggttcgaacacgatagagatcatgttaatgaaaagtatgaaaaactcttacatgacatcgacatatatatcaaggatgtacaagtattaaaatctatttccatcactaataatataacactatacgacactattataaataataagtcagtgtttcctatacgtcgcacaaacgacaaacaattaattaataaaataaaataaaataaaatccaatatatattataatcttatcgaaaaagttattaaaaattcattagagaaatgtactctaactaatgccgttctcgagtatatgatctcatctcgatctcaatcatcttatttgagtcgtattcctaatgagatattactcgaaatattatataaactcgacatgtacgatttacgtaatctatatacaagatatatgcgagagaatgatatcgcagagtatcatatagagaatgcgaggtcgatttctacacagactgatgaatgattatatactacatagtttataacatttggtatctataacactagtttttataagtcattatggcatttgtaatattgaaatcgtaatttgagatatagtgcacgatggatattgatgatattaaacataatagacgagtagtaagtaacattagcagtcttttagacaatgatatattatgtgatgtaattataactattggagatggagaagaaattaaagcgcataaaactatattggctgccggatctaaatattttagaacactgtttacaacacctatgataataagagatctagtaactagagtaaatctacagatgttcgataaagatgctgtcaaaaatattgtacaatacttatacaataggcatataagttctatgaatgtaatagacgtattaaaatgcgccgactatcttctaatcgatgatctagtaactgactgtgaatcttatgttaaggattatactaatcatgatacctgtatatatatttatcataggttgtatgagatgtctcatattccaatagtcaaatatgttaaacgtatggtgatgcgtaatataccaacattgataactacggatgcatttaaaaacgcagtattcgaaatattactcgatattatttctaccaacgatggtgagtatgtatacagagaaggatataaagtgacgatactattgaagtggctagattacaactacatcactgaagaacagctgttgtgtatactgtcctgtatagatatacaaaatctagataagaaatctagactactactctattcgaatacaactataaatatgtattcttcgtgtgtgaaatttctattagacaataaacagaatagaaacattataccccgtcagttatgtttagtatatcatgatactaactacaatataagtaacccatgtatattagtatataatattaatactatggaatacaataccatttacaccattcataataacataattaattactcatcagctgttgtcgataatgaaataataatagctggaggatataactttaacaatatatcattgaacaaggtatataaaataaatatcgaacacagaacatgtgtagaactcccacccatgataaagaatagatgtcatttttcactggctgtaatcgatgacatgatttatgctataggtggtcaaaacggtacaatagtggaacgaagcgtagaatgttatacaatgggcgatgatacgtggaagatgttacctgatatgcccgatgcaatatcgagctacggcatgtgtgtattcgatcaatacatatacattataggtggtcgtacagaacacgtcaaatatatacctgtacaacacatgaatgaaatagtagatataaacgaacattcttcagataaagttatacgatacgacactgtcaataatatatgggagaagttaccgaacttatgtagtggaaccataagaccaagcgttgtttcacataaagatgatatatatgttgtatgtgacatcaaagatgatgaaataaatggttttaagacttgtatatttagatataacacgaaggataattataaaggatgggaattgataacgactatagacagtaaattaaccgttttacatactattcttcacgacgatgccataacgatactacattggtatgaatcgtgtatgatacaagataaatttaatatcgacacctacaaatggactaatatatgttatcaacgttcgaatagttatatagtacacgatacactacccatctactaaataaaatacctcattatgagtttattatagacgactacccagattcatttcttatctaactatgacattcatacatatcagtattcattcttattcttatcgtctttagatgcttacataaaatgatattaaccatctattaaatgatttttatgcgtgtattattacttagtaatagtaatgtgagttgagttagttctgtccgaaaatgaattagtgtacaaactcaaatataaactgaagtttaaccttgtttttatgtctacttggcatgttgtcattgttgtctatactaacatggatatctttaaagaactaattttgaaatacaatgatgagaatgttttgatttctccagtttccattttatctactttatctattctacatcatggtgcagctggttctacagctgaacaactatcaaaatatatagagaatgtaaatgagaatgtatcagaggataaggatgacaataatgatgacatggacgtagatattccgtattgtgcgacactagctacagcaaataaaatatacggtagcgatagtatcgagttccatgcctccttcctacaaaaaataaaagacgattttcaaactgtaaactttaataatgctaaccaaacaaaggaactaatcaatgaatgggttaagacgatgacaaatggtaaaattaattccttattgactagtccactgcccattaatactcgcatggcagttgttagcgccgtccattttaaagcaatgtggaaatatccattttctaaacatcttacatatacagacaagttttatatttctaagaatatagttaccagtgttgatatgatggtgagtactgaaaatgacttacaatatgtacatattaatgaattattcggaggattctctattatcgatattccatacgagggaaactctagtatggtgattatactaccggacgacatagaaggtatatataacatagaaaaaaatataacagatgaaaattttaaaaaatggtgtggtatgttatctactaaaagtatagacttgtatatgccaaagtttaaagtggaaatgacagaaccgtataatctggtaccgattctagaaaatttaggacttactaatatattcggatattatgcagattttagcaagatgtgtaatgaaactatcactgtagaaaattttctacatacgacgtttatagatgttaatgaggagtatacagaagcatcggccgttacaggagtatttatgactaacttttcgatggtatatcgtacgaaggtctacataaaccatccattcatgtacatgattaaagacaatacaggacgtatactttttatagggaaatactgctatccacaataaatataaacaaatagacttttatcacgtttatctatgtctaaatattacaaatagtaatagcatacactaaacttaaaaataatatcatttactaactaatatagtataaactaaaaaattaaacaatatcattattataagtaataccaaaatgatgatatacggattaatactgtcttatattcgtgtcttcatccatcgctagtccactttacattcccgttattccacccatttcggaagataaatcgttcaatagtgtagaggtattagtttccttgtttagagatgaccaaaaagactatacggtaacttctcagttcaataactacactatcgataccaaagactggactatcaacgtactatccacacctgatggtctggagataccattgactaatataactattggtcacggtttccaactataggtcgtgcattgttcaaatcagagtccgaggatatcttccaaaagaatatgagtattataggtgtctctatagaatgtaagaagccatctacattacttactttttgaccgtgcgtaaaatgactcgagtatttaatagatttccagatatggcttattacagaggaaactgtctagaagccgtttatgtaacaatgacttataaaaatactaaactggagagactgattacacttacctctctaatggtggattgcctgaatactatcggttgatgagtaatggagtggatggttgattattgattagttttccttattctttttattcacacaaaaagaacatttttataaacatgaaaccactgtctaaatgtaattatgatattgatttatagatgaagatcagccttcaggaggattttaaccagtatgtttaatatgaaaaaataaacataacatattttgagattaagcgctattgtgattaaattattttgctctataaactgaatatatagccacaattattgacgggcttgtttatgaccggcaatcatgaatttacagaaattatctctggctatatatcttactgcgacatgttcgtggtgttatgaaacatgtatgagaaaaactgcgttgtttcatgacaacaatttagagcatgtagaagagaatcacgatagtggtgtagcgtcgctgccgtacaagtatctacaagtagtccatcaaagagaacgtagtagattgttggctacatttaattggacatctatagctgaggaggttaaaaatgagttcattaaaatatgtgatatcaacggaacatatatctataattatactattactgttagtatgattattgattccacggaagaactaccaacagttactccatttacaacatatgaaccgtctacctataattatactttcgataatagcactgttagtactaccgaagaactaaaagtgactccatcaccaactccatatgcgactgtaacaactcctcttccaacatcatcagttccatatgatcaacgatcgaataacaatgtaagtattatatctattcagatactaagtaaaatattgggagtcaatgaaacagaattaactaactatcttattacgcataaaaatgccatggttgacaataacacgattaataataacatcactgtcaacagtactacagtctatgatgatacatctgataataacacattgcatggtaacataggatttttggaaataaataattgctacaatgtctctgtatcagatgctagttttagaataacattagtaaacgatagttctgaagaaattgttctaatgctaacagggactagttcatccgacaccttcatatcttccaccaatatcactgaatgtttgaaaacattaatcaataatacgtcgaatattagcgacgtaagtataacacaaaatatgaatgtaacatctaattgtgataaatgctcaatgaatttgatgacatccgttattcctgttgttaatgaatttaacaatacgttggaaaaaattggtgtaaaagatgataaaaacaatacagtacataactattataattgtaaactaactacaaattctacgtgtgatgagttaatcaatttagatgaagtcattaacaacataactctgacaaatattataagtagtagtgcttcgacaatcaacaacagaaaaagacgagatctgaatggagagtttgaattttctacgtccaaggaattagattgtctgtacgaagcatatggtgtaaacgaggatataagtcattgttttgcatcgcctagacatagacgatccgacgacaaacaggagttcatagaaatgaaattactcgaccatgcgaaaaaagatttaagcatagacagtgttattcctagaggtacaactcattttcaagtaggtgcatctggagcaagtggtggtgttgtaggagatagtaacccatttcaaaatgttaaatcacgggctagtctattggcagaaaaaataatgcctagagtacctactactgctaccgaagaccagctatatgcaactataaatagacaagccaagttgcctgcaggtgttaaaagtactccatttacagaggcggttgtgtctacgataaaccaaaagctttctagtgttaaagaggtaacttatgcttctctcaatctaccaaaatcaagtggctatattcatagaccatctgaatctgttatttacagaactataagacggacacgtttacctagtgatagcgatagtgattttgaggatatacaaactgttgttaaggaatataatgaaagatatggtagacgagtaagtagaacacagtcatcaagtagcagtgattttgaaaatatagatgaggtggttgcagaatataaacaaaaatatggtggagcagctagcagggttagaacatcgtcatcaagtagtagtgattttgaaaatatagatgaggtggttgcagaatataatcaaaaatatggcaacgccatgacaaaaggacgtggttctcttaaaccggatccgttatatagtactgttaagaaaacacctaaaagtatagcatccggagtagacatagtttcaaaacaaacagactattctctattacctggtgtgaatacaggcagttctattgtgacgcctctcaccagaagaggagctactagacgacctaaacgcccatctacacctccacgcgaagatctaccaccgcttcctccgaatcctcctcatcgacaacttcctcgtggtggcgatcattctctaccacaagttcctcaacgtgattattctccaccacgtagacctcctccaccacttcctcctaaaccagttccagctattccacctagagatggtcaaccagataataaaggatttagtaagtttgtatcccctagacggtgtagaagatcaacctctggagtcttatgtggtatgatacaatcaagaccaaacgatgatgtatattcacttcttcaacgaccaaaaattgaaccagaatatgcggagatcggtaatggcttacccaagaacaatgttcctgtgataggcaagaaacatagtaaaaaatataaatcatcaatgacaaaaatatcaacaaaatttgataaatctatggcatttggaaccgcaatgttactaactggtcaacaggctattaaccaacaggttagatcaactgcgttgattagaaaagatcagatgagcaaggacgaaaagatattcgaagcagttacaatgactctatcaactataggttcaacgttgacaactgcaggtatgatatctccaccactaatgattgctggaatgggtatatcgcttatatcaggtataatagatacggtaaaagatatatattacctgttttcaggacatgagaagccggtagatccagttattaagttttttaatacatacgctggattagtatccgatagtagtaaaatgggtgtaaggaaatgtttgacgcctggagaagacacacttatttacatcgcatatagaaacgataccagttttaaacagaatacggaggcaatggctttgtatttcttagatgttatcgattcagagatcctatatctaaacacatcaaatttagttctagagtatcaactaaaggtggcttgtccaataggaacattaagatctgtagatgttgacataactgcttatacaatattatatgatacagcggataatattaagaaatacaagtttgtcagattggcaacgctactatccaaacatccagttattagattgacatgtggtttagcagcaacattggtaattaaaccgtacgaggtacccatcagtgatatgcaactactaaaaatggcgacgcatggtgaaccagaatcaactaaatctataccatctgatgtctgtgataagtatcctctaaagaaattctatcttttggcaggtggttgtccctatgacacatctcaaacttttattgtacatactacttgcagtattctactaagaacagctacatgggatcagtttagaaaccgatgggtgttacaaaatccatttaggcaagaagggacatataagcaactgtttacctttagcaaatacgattttaatgacaccataatagatcctaatggtgtggcgggtcatgctagcttttgtaccaatagaagcagcaaccaatgtttctggtccgaacctatgatattggaagacgtgtcatcatgcagttctagaactagaaaaatatacgtaaaactgggaatatttaatgctgaagggtttaatagttttgtactaaattgtccaactgggtctacaccgacatacatcaaagataaaaatgcggacagtaacaatgttatcatagagctacctgtaggtgattacggcactgccaaattgtattcggcaacaaaacagtcaaggatagctgtgttctgcacacataactatgataaacgattcaaatcagatattattgttctaatatttaatagtatcagtgatattcgattttcgagcatatacactggagacgtgaacggtagaaatagactgtttatcacattgtctagaggaatgccatatagatcaatgtattgcgataacagacgaccaggttgttattatgcaggaataccatttaatgaaaatagtgtagaatcagatctgcattatggaccagaaataatgcttaaggaaacatatgacgcaaacagtattgatccacgagttataacaaagtcaaagacacactttcctactccaataagtgtaaaattcatggttgccaatttaggaaatgggtataacaaacccgaaaatttttggaacgacgctaaaagtaagaaaaggacatatagcgcaatgacaataaaaatcctaccatgtacagtgagaaataaaaatgtaaactttggatataactatggacatattatttctaatatggtttatgcacaatctactagttatgattatggtgatggtaccaactatacatttaaatctgtaaatagatcagatcatgagtgtgaatctattttagatttgaaggctaaggaagtaactgtgacgtgtcccgcgtttagtataccaagaaatatatcagcgtatgaaggtctatgctttagtgtcactacatctaaagatcattgtgccacagataataattggttaaaatctcatggttatggaaaggcagatgctattaaacaacgtgcctgttttcatcattggaattatgttacaacgtcgttggattattactgttcggcagaaaatgtttttaaaagctactggccggactatgatccatgtaagtcatatattcatatagaatatagagacatatggatagaatctaacgtgttacagcaacctccttacacattcgaattcactcatgacaattctaacgaatatgtggataaagaaattagtaacaaattaaatgatctgtacaatgaatacaagaagattatggaatatagcgacggatcattgccggcgtctataaacagattagcaaaggcattgacttcagagggtagagaaatagcaagtgttaatatagatggtaatctgttagatattgcatatcaagcagataaggaaaagatggctgagatacagaacaaaataaatgatatcaccagagatttatttatacacactctatcagacaaagatataaaagacattatagaatccgaagaaggtaagagatgttgtataatagatgttaagaacaatcgtgttgaaaagtactatcctattgataattatctatgtggtactttagatgattatatatacacctctgtagagactaacaaatcttatgtgttagtaaacgacacttatatgagctatgactatcttgaatcatcaggtgtagttgttttatcatgttatgaaatgactataatctccttggatacaaaagatgccaaagatgctatagaagatgagatagtagcaagtgctgtagcagaagcattgaatgacatgtttaaggaattcgataaaaacgtaagtgttattataataaaagaagaagataattatctaaacagttcgtcagatatctacaatatattatatatcatatgtggcgctattctgctactgttagtcattattttgatattggcaatttatatagcgcgcaataaatatagaaccaggaaatataaaatgatgaaggattacgacaataggagcattaaatctgagcatcataatagtcttgaaacagtatctatggaaattatggataatcggtactaataaaatagtttaacgcttttagaaccagtttggtactggaagttcagttcattactagttgagaatattgatgatttttttaaaatgatatttacgtttacatgcttgcatcacagaatgatatattcacaagtattattaaaaatgagtatcgatagttacattaccatatcatccatgctcatgtggatctctattcattatataatcaatgataaatgttattagaatactttccgaataagtcttctaaatattgtattaattatgaaaaactatgctacgcgattatgatgcaacgatgtttaatgatacgatagattttataactagcgagatgtcatcagaatcatttatcataactatgtttaataataattcatcaacgaatatagataacatgtgttatttatactttgaatacttcgaagtctgtccatcttctctattatttagacactgtttatagaatgctgtgatataaacaaactactagaatctgggacaactctattacactgttatctaatgaatgaaagatttgaatcatctgttttaaaaaacctagtaaaggagtatggcatgaatacgtttaatgttcgtgattagtgatggacacattccgttacacaaatatctaactcatgataaagttgagaatgatatctttgatatgctttctgataaactactacgtgctatataagttgttgagaaaaggagcagacactaattatgcagatgatagaggtaatacttttcttcattacttctgcgtctatatgtccacttataataagatgccattcaataagatgcatcgtgaaaagaaatttattaaagagttggtaaaatatggagctgatattaataaagtaaataatagaggaaatacacctctacacttctacatatcacaatatgatcacagtcctcgtataatatttactcttttatcattgggagctgacttgacaatacaaaaacaatgttcgtctaactcccataatggaatatataaaatgtgaagatatagaatacaatactcttttaatgttaattaattggtacgagtcaaatacagaaaactagaaaagaaagaaggtcggcatctccttatatctatctattcataaggataatgatagtaatgaccttaatatactatcctatttactaaagaagtttgacataaaaacgatgaatactttaatgacgttatacctctacataatgcttatagcgtgcaacgttgatataatgtcttatctcgtatatattggatgtaatattaatctcccaactaacgataacaagagtatatttgatattatattagcacaaacagataataagctatatatagattgtattatctatcatcttataaaacacggactagatataacgttatccgtaatcaaaaaataattagtattattccgtattttccaaatgattactatgtaagatatataataacttattgcatcttaatgaacaacaatttcataaaagaatacaataatcaatgtttaaatcatacgtacgaagaactatttattgatttaataacattcgattatatagataatatcgttcagattgcgtcaatgatataaataggctcaaacaagaaaactattataatatattaagatatgaagatataaaatataaaatatacaatctagttaatgatatccatgttacaaacaagacttttcccatgtacatggacattatagagaattgtaacgtacacataaaacgtaaatataaactcataaatactgtcattgacaaaatatatagtatatcatcgtctgttgataataacaaactctcactattgcctccagaaatcatacgcgagataatatccaagttaagcgaatacgatttaaatactattttgtatggtcgtaaccatctaaaacattattataaatttaactagatattaatgatgaagatgacaccatcatatatcttgttggtatatatgttcgtagtcgtaagtggagatgttccgtatacacccattaatgggaaatgtaacggtacagactataacagtaataatctatgttgtaaacaatgcaatcctggaatgtatatgactcattcctgtaataccacttctaatacaaaatgtgacaagtgcccagatgacacctttacatccattcctaatcatagtcccgcgtgtctaagttgtcgaggcaaatgtagcagtaatcaagtagagactaaatcgtgtagtaacacacaggacagagtatgtgtctgtgcatccggatactactgcgaatttgaaggatcaaacggttgcaggctatgtgtaccacaaacaaagtgtggttctggttacggtgtatatggctactcatctaaaggagatgtaatatgtaaaaagtgtccgggtaatatagataaatgtgatctgtcctttaacagcatagatgtagaaattaatatgtatcctgttaacaagacctcttgtaattcgagtataggaagcagcagtaccatatcaacttccgagttaacaattactctaacacatgaggattgtactcctgtctttattggagattactattcagtcgttgataaactagcaacttcaggtttctttacaaacgataaagtacatcaagacctcacaacgcagtgcaagattaatctagaaatcaaatgtaattctggaagagaatctagacaactaacacccacgacgaaggtatactttatgcctcattcagaaacggtaactgtggtaggagactgtctctctaatctcgatgtctatatagtatatgccaatacggacgcgatatattccgacatggacgtcgtcgcgtatcatactagttatatactaaatgttgatcatattccaccaaatgattgtgaaagagattgagattaaatcgtctaacaaacaattagtttttatgacattaacatataataaataaattaatcattattgacttaacgatgacgaaagttatcatcatcttaggattcttgattattaatacaaattcattgtctatgaaatgtgaacaagaattaaagtgttgtaaactatgtaagccaggaacatattcagatcatcgatgtgataaatacagcgataccatttgtgggcattgtccgagtgacgcattcacgtcaatatataatcgttctccttggtgtcatagttgtagaggtcacatcttgtacacctaccacaaatagaatctgtcattgtgtctcgaatagttattgtctccttgaagcttctgatggtaactgtgttacatgtgctcctaaaacaaaatgtggtcgtggatatggaaagaaaggggaagatgaaatgggtaacaccatttgtaagaaatgtcggaagtgtacgtattcagatattgtatctcactctgatccatgtaaaccaaggacgagataatatatactcactggatagacaaaataagttggattatccatctctccctcatcccctccctcactttttatcatcctatatgttattccttccttttctcgcatcatttttcgtgaaatataatataggaataattaacaccagaatagctatggcctgcggtaaagattgtgcatgtattctgtgtcgtctactggatgaagatataacgtacaaaaaataaaaccagagattgaaacgtatcgcaacttatcaaaacatatagatagacgaggaaacaatgcgctacattgttacgtctccaataaatgcgatacagacattaagattgttcgactgttgctctcttgcggaatttatcatggagtgaatgtcctgtttcatttgtttccatgacatattacaaaatcgattccgtccaagatgataaaaacatttaccggcatcataaacacggagtttattttatatggctcgcataaaattactaaaaatatattgatctgtttttctttttctttcgtacatttctaattatgaaaaagtaaatcattatgagatgggcgagatggacgagattgtacgcatcgttcgcgacagtatgtggtacatacctaacgtatttatagacgacggtgagaatgaaggtcacatttctgtcaacaatgtctgtcatatgtatttcacattctttgatgttgatacatcgtctcatctgtttaagttagttattaaacactgcgatctgaataaacgactaaaatgtggtaactctccattacattgctatacgatgaatacacgatttaagccatctgtattaaagatattgttacaccacggcatgtgtaactttgatagcaaggatgaaaaaggacatattcctctacaccactatctgattcattcactatcaatcgataacaagatctttgatatactaacggaccacattgatgactttagtaaatcatccgatctattgctgtgttatcttagatataaattcaatgggagcttaaactactacgttctgtacaaattattgactaaaggatctgaccctaattgcgtcgacgaggatggactcacttctcttcattactactgtaaacacatatccgcgttccacgaaagcaattattacaagtcaaagagttacactaagatgcgagctgagaagcgattcatctacgcgataatagatcatggagcaaacattaacgcggttacgaaaatcggaaatacgccgttacacacttaccttcaacagtataccaaacatagccctcgtgtggtgtatactcttttatctcgaggagccgatacgaggatacgtaataatcttgattgtacacccatcatggaatacataaagaacgattgtgcaacaggtcatattctcataatgttactcaattggcacgaacaaaaatacgggaaattacaaaaggaagaaggacatcatctactttatctattcataaaacataatcaaggatacggaagtcacgctctcaatatattacggtatctactagataggttcgacattcagaaagacgaatactataataccatgactcctcttcataccgccttccagaattgtaacaacaatgttgcctcatacctcgtatacatcggatacgacatcaaccttccgactaaagacggtaagacagtattcgacttggtgtttgaaaacagaaacatcttatacaatgcggatattcacgacatcatccaccacagactgaaagtatctctacctatgatcaaatcgttgttctacaggatgtccgagttctctccttacgacgattactacgtaaagaagataatagcctactgcctattaagggacgaatcattcgcggaactacatagtaaatcctgtttaaacaaggactataaaagtgtatttatgaaaaatatatcattcgataagatagattccatcatcgaaaaatgtagtcgtgacataggtcgcctcaaagagattcgaatctccgacaccgacctgtatacggtattaagaacagaagacatacggtatcacagctatcttgaagtcatacattcggacaaacatatctcatttcccatgtacgacgatctcatagaacagtgccatctatcgatggagcgtaaaagtaaactcgtagacaaagcactcaataaattagagtctatcatcgatggtcaatctagactatcgtatttgcctccggaaattatgcgcaatatcataaccaagctaagcgactatcatctaaacagtatgttgtacggaaagaaccattacaaatattattcataatagaaagaaaatatttaaaaatatctatatgatttgagaagtaggaaacaggaacaagacgataattactacattattaaatcatgaagtccgtattatactcgtatatattgttctctcatgtataataaacggaaaagatatagcaccgcatgctccatccaatggaaagtgtaaagacaacgaatacagacgccgtcccacccactttttatagtaagttttttacccataaataataaatacaataattaatttctcgtaaaagtagaaaatatattctaatttattgtatggtaaggaaatagaatcatctagaacagcaatcatgaaacaatatatcgtcctggcatgcatatgcctggcggcagctgctatccctaccagtcttcagcaatcattcgcatcctcgtgtacggaagaagaaaacaaccatcatatgggaatcgatgttattatcaaagtcaccaagcaagaccaaacaccgactaatgataagatttgtcaatcagtaaccgaagttacagagtctgaagacgatggggtatccgaagaagtcgtaaaaggagatcccaccacttattacactgtcgtcggtggaggtctgagaatgaactttggattcaccaaatgtcctcagattaaatccatctcagaatccgctgatggaaacacagtgaatgctcggttgtctagcgtctctccaatgtacggcattgaatctccagccatcactcatgaagaagctcttgctatgatcaacgactgtgcggtgtctatcaatatcaaatgtagtgaagaagagaaagacagcaacatcaagacccatccagtactcgggtctaacatctctcataagaaagtgaggtacgaagatatcatcggttcaacgatcgtcgatataaaatgtgtcaaggatctagagtttagcgttcgtatcggagacatgtgcaaggaagcatctgaacttgaagtcaaggatggattcaagtatatcgacggatcggtatctgaaggtgcaaccgatgatacttcactcatcgattcaacaaaactcaaagcgtgtgtctgaatcgataactctattcatctgaaattggatgagtggggttaatcgaacgattcaggcacaccacgaattaaaaaagtgtaccggacactactccggtttgcaaaacaaaaatgttcttaactacattcacaaaaagttacctctcgttacttcttctttttctgtctcaagtgtgatacgattatgagcacttttcctatttcctttcagggtatcacaaaaatatttttattctctttctctcttcgatggtctcataaaaaagttttacaaaaatatttttattctctttctgatggagtcgtaaaaaagttttatctctttctctcttcgatggtctcataaaaaagttttacaaaaatatttttattctctttctgatggagtcgtaaaaaagttttatttctttctctcttcgatggtctcataaaaaagttttacaaaaatatttttattctctttctgatggagtcgtaaaaaagttttatctctttctctcttcgatggtctcataaaaaagttttacaaaaatatttttattctctttctgatggagtcgtaaaaaagttttatctctttctctcttcgatggtctcataaaaaagttttacaaaaatatttttattctctttctgatggagtcgtaaaaaagttttatctctttctctcttcgatggtctcataaaaaagttttacaaaaatatttttattctctttctgatggagtcgtaaaaaagttttatctctttctctcttcgatggtctcataaaaaagttttacaaaaatatttttattctctttctgatggagtcgtaaaaaagttttatctctttctctcttcgatggtctcataaaaaagttttacaaaaatatttttattctctttctgatggagtcgtaaaaaagttttatctctttctctcttcgatggtctcataaaaaagttttacaaaaatatttttattctctttctgatggagtcgtaaaaaagttttatctctttctctcttcgatggtctcataaaaaagttttacaaaaatatttttattctctttctgatggagtcgtaaaaaagttttatctctttctctcttcgatggtctcataaaaatattaaaacctcattctgatgcatcaactatttcttaaacaataacgtccaacaacatatactcatagagcttatcaaacatcccctgtgcccatctaggttgccagacaattgcatcataaaataatgtttataatttacacgttaacatcatataataaacgtatatagtataatattttttggcatataaatgatctagtaaaatccatgtaggggatacggctcacgtttttttctttggtacaaaatttcacacagtttttatacagacaaatattctctcatccatatattttaaaacattgacttttgtactaagaaaatattaaacctctttctgacggagtcgtaaaaaagttttatcctttctccttcgatggtctcacaaaaatattaaacctctttctgatagtctctataaagcgattgatttttcttaccctcagagtttcctacagtcgtg

SEQ ID NO: 4 - DNA, 4522 bp, Artificial Sequence
  Synthetic Construct, pBSSK ECTV7.5 EGFP
ctgacgcgccctgtagcggcgcattaagcgcggcgggtgtggtggttacgcgcagcgtgaccgctacacttgccagcgccctagcgcccgctcctttcgctttcttcccttcctttctcgccacgttcgccggctttccccgtcaagctctaaatcgggggctccctttagggttccgatttagtgctttacggcacctcgaccccaaaaaacttgattagggtgatggttcacgtagtgggccatcgccctgatagacggtttttcgccctttgacgttggagtccacgttctttaatagtggactcttgttccaaactggaacaacactcaaccctatctcggtctattcttttgatttataagggattttgccgatttcggcctattggttaaaaaatgagctgatttaacaaaaatttaacgcgaattttaacaaaatattaacgcttacaatttccattcgccattcaggctgcgcaactgttgggaagggcgatcggtgcgggcctcttcgctattacgccagctggcgaaagggggatgtgctgcaaggcgattaagttgggtaacgccagggttttcccagtcacgacgttgtaaaacgacggccagtgagcgcgcgtaatacgactcactatagggcgaattgggtaccgggccccccctcgaggtcgacggtatcgataagcttggatatatggcaagaacataatgatagcgtatacagtataggaaaggagtgcatagataatatatacgaagacaaccataccgtagacgaattctacaatatagacagcgtatcagatgtagatgacgcggaacacatatctcagataactaatgatgtatctacacaaacgggaaaaagaaatcagagttagatagatacatggaaatgtatcctcgtcatagatatagtaagcattctgtctttaagggattttctgacaaagttagaaaaaatgatttagacatgaatgtggtaaaagaattactttctaacggtgcatctctaacaatcaaggatagcagtaataaggatccagtacccttcacctaattccaaacccacccgctttttatagtaagtttttcacccataaataataaatacaataattaatttctcgtaaaagtagaaaatatattctaatttattgcacggtaaggaagtagatcataacaccatggtgagcaagggcgaggagctgttcaccggggtggtgcccatcctggtcgagctggacggcgacgtaaacggccacaagttcagcgtgtccggcgagggcgagggcgatgccacctacggcaagctgaccctgaagttcatctgcaccaccggcaagctgcccgtgccctggcccaccctcgtgaccaccctgacctacggcgtgcagtgcttcagccgctaccccgaccacatgaagcagcacgacttcttcaagtccgccatgcccgaaggctacgtccaggagcgcaccatcttcttcaaggacgacggcaactacaagacccgcgccgaggtgaagttcgagggcgacaccctggtgaaccgcatcgagctgaagggcatcgacttcaaggaggacggcaacatcctggggcacaagctggagtacaactacaacagccacaacgtctatatcatggccgacaagcagaagaacggcatcaaggtgaacttcaagatccgccacaacatcgaggacggcagcgtgcagctcgccgaccactaccagcagaacacccccatcggcgacggccccgtgctgctgcccgacaaccactacctgagcacccagtccgccctgagcaaagaccccaacgagaagcgcgatcacatggtcctgctggagttcgtgaccgccgccgggatcactctcggcatggacgagctgtacaagtaaaagggtcaagacaattctgcagatatcattaacaaacatacaactattgatgaacgccggtatatagtacactcctatctaaaaaattatagaaatttcgattatccatttttcaggaagttagttttgactaataaacatggtctcaacaattattataatgtaggtgatagcaaatatggaacaccgctacatatattggcgtctaataaaaaattaataactcctaattacatgaagttattagtgtataacggaaatgatataaacgcacgaggcgaagatacacaaatgcgaaccccattacacaaatatttgtgtaaatttgtatatcataatattgaatatgttgtccgatactacaatgaaaagattatttctagagcggccgccaccgcggtggagctccagcttttgttccctttagtgagggttaattgcgcgcttggcgtaatcatggtcatagctgtttcctgtgtgaaattgttatccgctcacaattccacacaacatacgagccggaagcataaagtgtaaagcctggggtgcctaatgagtgagctaactcacattaattgcgttgcgctcactgcccgctttccagtcgggaaacctgtcgtgccagctgcattaatgaatcggccaacgcgcggggagaggcggtttgcgtattgggcgctcttccgcttcctcgctcactgactcgctgcgctcggtcgttcggctgcggcgagcggtatcagctcactcaaaggcggtaatacggttatccacagaatcaggggataacgcaggaaagaacatgtgagcaaaaggccagcaaaaggccaggaaccgtaaaaaggccgcgttgctggcgtttttccataggctccgcccccctgacgagcatcacaaaaatcgacgctcaagtcagaggtggcgaaacccgacaggactataaagataccaggcgtttccccctggaagctccctcgtgcgctctcctgttccgaccctgccgcttaccggatacctgtccgcctttctcccttcgggaagcgtggcgctttctcatagctcacgctgtaggtatctcagttcggtgtaggtcgttcgctccaagctgggctgtgtgcacgaaccccccgttcagcccgaccgctgcgccttatccggtaactatcgtcttgagtccaacccggtaagacacgacttatcgccactggcagcagccactggtaacaggattagcagagcgaggtatgtaggcggtgctacagagttcttgaagtggtggcctaactacggctacactagaaggacagtatttggtatctgcgctctgctgaagccagttaccttcggaaaaagagttggtagctcttgatccggcaaacaaaccaccgctggtagcggtggtttttttgtttgcaagcagcagattacgcgcagaaaaaaaggatctcaagaagatcctttgatcttttctacggggtctgacgctcagtggaacgaaaactcacgttaagggattttggtcatgagattatcaaaaaggatcttcacctagatccttttaaattaaaaatgaagttttaaatcaatctaaagtatatatgagtaaacttggtctgacagttaccaatgcttaatcagtgaggcacctatctcagcgatctgtctatttcgttcatccatagttgcctgactccccgtcgtgtagataactacgatacgggagggcttaccatctggccccagtgctgcaatgataccgcgagacccacgctcaccggctccagatttatcagcaataaaccagccagccggaagggccgagcgcagaagtggtcctgcaactttatccgcctccatccagtctattaattgttgccgggaagctagagtaagtagttcgccagttaatagtttgcgcaacgttgttgccattgctacaggcatcgtggtgtcacgctcgtcgtttggtatggcttcattcagctccggttcccaacgatcaaggcgagttacatgatcccccatgttgtgcaaaaaagcggttagctccttcggtcctccgatcgttgtcagaagtaagttggccgcagtgttatcactcatggttatggcagcactgcataattctcttactgtcatgccatccgtaagatgcttttctgtgactggtgagtactcaaccaagtcattctgagaatagtgtatgcggcgaccgagttgctcttgcccggcgtcaatacgggataataccgcgccacatagcagaactttaaaagtgctcatcattggaaaacgttcttcggggcgaaaactctcaaggatcttaccgctgttgagatccagttcgatgtaacccactcgtgcacccaactgatcttcagcatcttttactttcaccagcgtttctgggtgagcaaaaacaggaaggcaaaatgccgcaaaaaagggaataagggcgacacggaaatgttgaatactcatactcttcctttttcaatattattgaagcatttatcagggttattgtctcatgagcggatacatatttgaatgtatttagaaaaataaacaaataggggttccgcgcacatttccccgaaaagtgccac

SEQ ID NO: 5 - DNA, 5104 bp, Artificial Sequence
  Synthetic Construct, pBSSK-ECTV036Rev
ctgacgcgccctgtagcggcgcattaagcgcggcgggtgtggtggttacgcgcagcgtgaccgctacacttgccagcgccctagcgcccgctcctttcgctttcttcccttcctttctcgccacgttcgccggctttccccgtcaagctctaaatcgggggctccctttagggttccgatttagtgctttacggcacctcgaccccaaaaaacttgattagggtgatggttcacgtagtgggccatcgccctgatagacggtttttcgccctttgacgttggagtccacgttctttaatagtggactcttgttccaaactggaacaacactcaaccctatctcggtctattcttttgatttataagggattttgccgatttcggcctattggttaaaaaatgagctgatttaacaaaaatttaacgcgaattttaacaaaatattaacgcttacaatttccattcgccattcaggctgcgcaactgttgggaagggcgatcggtgcgggcctcttcgctattacgccagctggcgaaagggggatgtgctgcaaggcgattaagttgggtaacgccagggttttcccagtcacgacgttgtaaaacgacggccagtgagcgcgcgtaatacgactcactatagggcgaattgggtaccgggccccccctcgaggtcgacggtatcgataagcttgatatcgtgttgtctaacgtattggacatgcttatgtacgtagaagaaaataatgaagaggatgctagaatcaaggaggagcaagaactgttgttgctatattgatacataattgaaaaatctaccagcttaaatacggaggattacgatgaaacacagagtgtattctgaaggattggatattagtactgatttaaactcgataatcagtcaaccatctgcattggatatgtatatggacgaagatgaaatcgtggaacttcttaatatattaactgagttaggttgtgatgttgactttgatgaaaattttagcgatatagccgatgatattctagaatcgttggtagaacaggatgtataagtttttatgttaactaaatgtggccatttgcatcggtgcctgctggagcaaaatgtaggctggtagaaacactaccagaaaatatggattttagatccgatcatttgacgacatttgaatgttttaacgaaattatcacactagctaagaaatatatatacatagcatctttttgttgtaatcctctgagtacgactaggggagcgcttatttttgataaactaaaagaggcatctgaaaaaggggttaaaataatagttttgctagatgaacgagggaagagaaatctgggagagctacaaagtcactgcccggatataaattttataacagttaatatagataaaaaaaataatgtgggactactactcggttgtttttgggtgtcagatgatgaaagatgttatgtaggaaacgcgtcatttactggaggatctatacatacgattaaaacgttaggtgtatattctgattatcctccgctggccacagatcttcgtagaagatttgatacttttaaagcctttaatagcgcaaaaaattcatggttgaatttatgctctgcggcttgttgtctgccagttagcactgcgtatcatattaagaatcctataggtggagtgttctttactgattctccagaacacctattgggatattctagagatctagacaccgatgtagttattgataaactcaagtcagctaagactagtatagatattgaacatttggccatagttcccactacacgtgttgacggtaatagctactattggcctgacatttacaactccattatagaagcagccattaatagaggagttaagattagacttctagttggtaattgggataagaacgacgtatattctatggcaaccgctagaagtctagatgcattgtgtgtccaaaatgatctatctgtgaaggttttcactattcagaataatacaaaattgttgatagtcgatgacgaatatgttcatatcacttcggcaaatttcgatggaacccattaccaaaatcacggattcgtcagttttaatagtatagataaacagcttgtaagcgaggctaaaaaaatatttgaacgtgactgggtctccagtcactctaaaagcttgaagatttaaggtaccgagctcttacgcgtgctagcggatccgcggccgcctcgagtatttgagagagattgggtatctagccacagtaaatcgttgaaaatttaaaaatagaaaatagagacgtatagaacaccatcatgttaaacagggtacgaaccttgatgaaaacagctaacaattatgaaactattgagatattgcgtaactatttaagactgtataccattttagcacgaaatgaagaaggtcgtggtatactaatatacgatgataacatagatagtgttatgtcgatgatgaatattacaagattagaagttataggattgactcattgcacaaaattaagatcgtcgccgccaattcctatgcgtagattgtttatggacgaaatagatcatgtgtcatattattctccaaaaacttcagattatccgttgattgatattatacgaaagcgttctcacgaacagggagatatagcactggctttagaacgatacggtatcgagaatacagattccatatcagaaattaatgaatggttgtcgtcaaaaggtttagcatgttatagatttgtaaaatttaacgattacaggaaacagatgtatcgtaagttctctaggtatactatagtcgacagtatgataatagggcatataggctgcagcccgggggatccactagttctagagcggccgccaccgcggtggagctccagcttttgttccctttagtgagggttaattgcgcgcttggcgtaatcatggtcatagctgtttcctgtgtgaaattgttatccgctcacaattccacacaacatacgagccggaagcataaagtgtaaagcctggggtgcctaatgagtgagctaactcacattaattgcgttgcgctcactgcccgctttccagtcgggaaacctgtcgtgccagctgcattaatgaatcggccaacgcgcggggagaggcggtttgcgtattgggcgctcttccgcttcctcgctcactgactcgctgcgctcggtcgttcggctgcggcgagcggtatcagctcactcaaaggcggtaatacggttatccacagaatcaggggataacgcaggaaagaacatgtgagcaaaaggccagcaaaaggccaggaaccgtaaaaaggccgcgttgctggcgtttttccataggctccgcccccctgacgagcatcacaaaaatcgacgctcaagtcagaggtggcgaaacccgacaggactataaagataccaggcgtttccccctggaagctccctcgtgcgctctcctgttccgaccctgccgcttaccggatacctgtccgcctttctcccttcgggaagcgtggcgctttctcatagctcacgctgtaggtatctcagttcggtgtaggtcgttcgctccaagctgggctgtgtgcacgaaccccccgttcagcccgaccgctgcgccttatccggtaactatcgtcttgagtccaacccggtaagacacgacttatcgccactggcagcagccactggtaacaggattagcagagcgaggtatgtaggcggtgctacagagttcttgaagtggtggcctaactacggctacactagaaggacagtatttggtatctgcgctctgctgaagccagttaccttcggaaaaagagttggtagctcttgatccggcaaacaaaccaccgctggtagcggtggtttttttgtttgcaagcagcagattacgcgcagaaaaaaaggatctcaagaagatcctttgatcttttctacggggtctgacgctcagtggaacgaaaactcacgttaagggattttggtcatgagattatcaaaaaggatcttcacctagatccttttaaattaaaaatgaagttttaaatcaatctaaagtatatatgagtaaacttggtctgacagttaccaatgcttaatcagtgaggcacctatctcagcgatctgtctatttcgttcatccatagttgcctgactccccgtcgtgtagataactacgatacgggagggcttaccatctggccccagtgctgcaatgataccgcgagacccacgctcaccggctccagatttatcagcaataaaccagccagccggaagggccgagcgcagaagtggtcctgcaactttatccgcctccatccagtctattaattgttgccgggaagctagagtaagtagttcgccagttaatagtttgcgcaacgttgttgccattgctacaggcatcgtggtgtcacgctcgtcgtttggtatggcttcattcagctccggttcccaacgatcaaggcgagttacatgatcccccatgttgtgcaaaaaagcggttagctccttcggtcctccgatcgttgtcagaagtaagttggccgcagtgttatcactcatggttatggcagcactgcataattctcttactgtcatgccatccgtaagatgcttttctgtgactggtgagtactcaaccaagtcattctgagaatagtgtatgcggcgaccgagttgctcttgcccggcgtcaatacgggataataccgcgccacatagcagaactttaaaagtgctcatcattggaaaacgttcttcggggcgaaaactctcaaggatcttaccgctgttgagatccagttcgatgtaacccactcgtgcacccaactgatcttcagcatcttttactttcaccagcgtttctgggtgagcaaaaacaggaaggcaaaatgccgcaaaaaagggaataagggcgacacggaaatgttgaatactcatactcttcctttttcaatattattgaagcatttatcagggttattgtctcatgagcggatacatatttgaatgtatttagaaaaataaacaaataggggttccgcgcacatttccccgaaaagtgccac

What is claimed is:

1. A recombinant ectromelia virus (ECTV) vector comprising at least one expression unit for expression of at least one heterologous nucleic acid sequence.

2. The ECTV vector of claim 1 wherein the at least one expression unit is under the control of an ECTV early/late promoter.

3. The recombinant ECTV vector of claim 1, wherein the ECTV vector is attenuated.

4. The recombinant ECTV vector of claim 1, wherein the early/late promoter is selected from the group consisting of 7.5 and H5.

5. The recombinant ECTV vector of claim 1, wherein the ECTV vector comprises a deletion or inactivation of at least one immune evasion gene.

6. The recombinant ECTV vector of claim 5, wherein the at least one immune evasion gene is selected from the group consisting of a cytokine receptor homologue and a cytokine mimic.

7. The recombinant ECTV vector of claim 1, wherein the ECTV vector further comprises one or more additional heterologous nucleotide sequence.

8. The recombinant ECTV vector of claim 7, wherein the one or more additional heterologous nucleotide sequence is selected from the group consisting of a sequence encoding a therapeutic agent, a sequence encoding a targeting moiety, a sequence encoding a detectable and/or selectable marker, a pro-apoptotic gene, and a pro-necroptotic gene.

9. The recombinant ECTV vector of claim 1, wherein the target nucleotide sequence encodes a polypeptide selected from the group consisting of an antigenic polypeptide sequence, an antibody and an antibody fragment.

10. The recombinant ECTV vector of claim 9, wherein the antigenic polypeptide sequence is at least one selected from the group consisting of a cancer/tumor antigen, an autoantigen, an allergen, an antigen associated with hypersensitivity, a prion antigen, a viral antigen, a bacterial antigen, an antigen from protozoa or fungi, and a parasitic antigen.

11. The recombinant ECTV vector of claim 10, wherein the at least one antigen comprises a cancer specific antigen.

12. The recombinant ECTV vector of claim 10, wherein the at least one antigen comprises a viral antigen.

13. The recombinant ECTV vector of claim 12, wherein the viral antigen is selected from the group consisting of SARS-CoV-2 spike antigen, and a fragment of the SARS-CoV-2 spike antigen comprising the receptor binding domain (RBD).

14. The recombinant ECTV vector of claim 10, wherein the at least one antigen is a bacterial antigen.

15. The recombinant ECTV vector of claim 10, wherein the expression unit comprises at least two nucleotide sequences encoding antigenic polypeptides.

16. The recombinant ECTV vector of claim 15, wherein the at least two antigenic polypeptides are from two different viruses or from two different clades of the same virus.

17. The recombinant ECTV vector of claim 15, wherein the expression unit comprises at least one antigenic polypeptide from a virus and at least one cancer-specific antigenic polypeptide.

18. The recombinant ECTV vector of claim 15, wherein the at least one antigen is selected from the group consisting of a CTL-recognized epitope, a T helper cell-recognized epitope, and a B cell-recognized epitope.

19. The recombinant ECTV vector of any one of claims 1-18, wherein the vector comprises a nucleotide sequence selected from the group consisting of:
a) the nucleotide sequence of SEQ ID NO:1 further comprising a nucleotide sequence for expression of a heterologous sequence;
b) the nucleotide sequence of SEQ ID NO:2 further comprising a nucleotide sequence for expression of a heterologous sequence;
c) a fragment of the nucleotide sequence of SEQ ID NO: 1 further comprising a nucleotide sequence for expression of a heterologous sequence; and
d) a fragment of the nucleotide sequence of SEQ ID NO:2 further comprising a nucleotide sequence for expression of a heterologous sequence.

20. A vaccine composition comprising an ECTV vector.

21. The composition of claim 20, wherein the ECTV vector is a recombinant ECTV vector of any one of claims 1-19.

22. The composition of any one of claims 20-21, further comprising a pharmaceutical carrier.

23. A method for inducing an immune response in a subject comprising administering the vaccine composition of any one of claims 20-22 to the subject in an amount effective to induce an immune response.

24. The method of claim 23, wherein the immune response comprises one or more of: the production of memory CD8+ T cells specific for the at least one antigen, the production of memory CD4+ T cells specific for the at least one antigen, and the production of antibodies specific for the at least one antigen.

25. A method for treating cancer in a subject in need thereof, the method comprising administering the composition of any one of claims 20-22 to the subject.

26. The method of claim 25, wherein the recombinant ECTV vector comprises a target nucleotide sequence encoding a cancer antigen.

27. The method of claim 25, wherein the recombinant ECTV vector further comprises a target nucleotide sequence encoding a viral antigen.

28. The method of claim 27, wherein the viral antigen is selected from the group consisting of an influenza viral antigen and a human cytomegalovirus antigen.

29. The method of claim 25, wherein the recombinant ECTV vector comprises a target nucleotide sequence encoding an immunotherapeutic antibody for the treatment of cancer.

30. A method for treating a viral infection, or a disease or disorder associated therewith, in a subject in need thereof, the method comprising administering the composition of any one of claims 20-22 to the subject.

31. The method of claim 30, wherein the recombinant ECTV vector comprises a target nucleotide sequence encoding a viral antigen.

32. The method of claim 30, wherein the viral infection comprises SARS-CoV-2 infection.

33. The method of claim 30, wherein the recombinant ECTV vector comprises a target nucleotide sequence encodes an immunotherapeutic antibody for the treatment of the viral infection.
